(19) United States
(12) Patent Application Publication
(10) Pub. No.: US 2025/0346907 A1
(43) Pub. Date: Nov. 13, 2025

(54) COMPOUNDS AND METHODS FOR REDUCING GLYCOGEN SYNTHASE 1

(71) Applicant: Ionis Pharmaceuticals, Inc., Carlsbad, CA (US)

(72) Inventors: Susan M. Freier, San Diego, CA (US); Huynh-Hoa Bui, San Diego, CA (US); Bethany Fitzsimmons, Webster, NY (US); Holly Kordasiewicz, San Diego, CA (US); Tamar R. Grossman, San Diego, CA (US)

(73) Assignee: Ionis Pharmaceuticals, Inc., Carlsbad, CA (US)

(21) Appl. No.: 18/722,831

(22) PCT Filed: Dec. 21, 2022
(86) PCT No.: PCT/US2022/082148

§ 371 Date: Jun. 21, 2024

Related U.S. Application Data
(60) Provisional application No. 63/292,883, filed on Dec. 22, 2021.
(60) Provisional application No. 63/317,437, filed on Mar. 7, 2022.

(51) Int. Cl. C12N 15/115; A61K 47/46

(52) U.S. Cl. CPC C12N 15/115; A61K 47/46

(57) ABSTRACT

Provided are compounds, methods, and pharmaceutical compositions for reducing the amount or activity of GYS1 RNA in a cell or subject, and in certain instances reducing the amount of GYS1 protein in a cell or subject. Such compounds, methods, and pharmaceutical compositions are useful to ameliorate at least one symptom or hallmark of a glycogen storage disease. Such glycogen storage diseases include Lafora disease, adult polyglucosan body disease (APBD), Andersen's disease, and Pompe disease.

### SEQUENCE LISTING

[0001] The present application is being filed along with a Sequence Listing in electronic format. The Sequence Listing is provided as a file entitled BIOL0447SEQ.xml, created on Dec. 16, 2022, which is 2.91 MB in size. The information in the electronic format of the sequence listing is incorporated herein by reference in its entirety.

### FIELD

[0002] Provided are compounds, pharmaceutical compositions, and methods of use for reducing the amount or activity of glycogen synthase 1 (hereinafter referred to as GYS1) RNA in a cell or subject, and in certain instances reducing the amount of GYS1 protein in a cell or subject. Such compounds, methods, and pharmaceutical compositions are useful to ameliorate at least one symptom or hallmark of a polyglucosan disorder in a subject. In certain embodiments, such compounds, methods, and pharmaceutical compositions are useful to ameliorate at least one symptom or hallmark of a glycogen storage disease. In certain embodiments, such compounds, methods, and pharmaceutical compositions are useful to ameliorate at least one symptom or hallmark of Lafora disease in a subject. In certain embodiments, such compounds, methods, and pharmaceutical compositions are useful to ameliorate at least one symptom or hallmark of adult polyglucosan body disease (APBD) in a subject.

### BACKGROUND

[0003] Glycogen is a branched polymer of glucose that constitutes the sole carbohydrate reserve for mammals. It is synthesized by glycogen synthase (GYS), the only mammalian enzyme able to polymerize glucose (Bollen M. et al. Biochem. J. 1998 336: 19-31). Glycogen biosynthesis involves chain elongation by glycogen synthase and chain branching by glycogen branching enzyme. If chain elongation outbalances chain branching, glycogen forms starch-like precipitates made up of long, non-branched chains called polyglucosans. The most glycogenic tissues are muscle and liver.

[0004] Glycogen synthase 1 (GYS1) is an enzyme involved in converting glucose to glycogen by catalyzing the elongation of short glucose polymers into long glycogen polymers. Mutations in GYS1 are associated with glycogen storage diseases. In the brain, glycogen is normally stored in astrocytes (brown A. M. J. Neurochem. 89: 537-552, 2004) and glycogen synthesis is normally absent in neurons because of tight regulation of GYS1 by laforin and malin (Vilchez et al., Nat. Neurosci. 10: 1407-1413, 2007). Nevertheless, aberrant glycogen accumulation in neurons is a hallmark of patients suffering from Lafora disease, Pompe disease, Andersen's disease, adult polyglucosan body disease, or other GYS1-associated diseases or disorders.

[0005] Currently, there is a lack of specific inhibitors for GYS1. It is therefore an objective herein to provide methods for the treatment of such diseases or disorders. It is therefore an objective herein to provide compounds, methods, and pharmaceutical compositions for the treatment of such diseases or disorders.

### SUMMARY OF THE INVENTION

[0006] Provided herein are compounds, pharmaceutical compositions, and methods of use for reducing the amount or activity of GYS1 RNA, and in certain embodiments reducing the expression of GYS1 protein in a cell or subject. In certain embodiments, the subject has a disease or disorder associated with GYS1. In certain embodiments, the disease or disorder associated with GYS1 is a glycogen storage disease. In certain embodiments, the subject has a neurogenerative disease characterized by an accumulation of aberrant glycogen, an accumulation of polyglucosan bodies, and/or an accumulation of Lafora bodies. In certain embodiments, compounds useful for reducing the amount or activity of GYS1 RNA are oligomeric compounds. In certain embodiments, compounds useful for reducing the amount or activity of GYS1 RNA are modified oligonucleotides. In certain embodiments, compounds useful for reducing expression of GYS1 protein are oligomeric compounds. In certain embodiments, compounds useful for reducing expression of GYS1 protein are modified oligonucleotides.

[0007] Also provided are methods useful for ameliorating at least one symptom of a disease or disorder associated with GYS1. In certain embodiments, the disease or disorder associated with GYS1 is a glycogen storage disease. In certain embodiments, the glycogen storage disease is Lafora disease. In certain embodiments, the glycogen storage disease is adult polyglucosan body disease (APBD). In certain embodiments, the glycogen storage disease is Andersen's disease. In certain embodiments, the glycogen storage disease is Pompe disease. In certain embodiments, at least one symptom or hallmark of the glycogen storage disease is seizures, cognitive deterioration, neuromuscular weakness, myoclonus, dementia, ataxia, cerebellar dysfunction, impaired speech, loss of ambulation, swallowing difficulty, or epileptic episodes. In certain embodiments, a symptom or hallmark of the glycogen storage disease is an increase in glycogen levels, accumulation of polyglucosan bodies, or accumulation of Lafora bodies.

### DETAILED DESCRIPTION OF THE INVENTION

[0008] It is to be understood that both the foregoing general description and the following detailed description are exemplary and explanatory only and are not restrictive. Herein, the use of the singular includes the plural unless specifically stated otherwise. As used herein, the use of “or” means “and/or” unless stated otherwise. Furthermore, the use of the term “including” as well as other forms, such as “includes” and “included”, is not limiting. Also, terms such as “element” or “component” encompass both elements and components comprising one unit and elements and components that comprise more than one subunit, unless specifically stated otherwise.

[0009] The section headings used herein are for organizational purposes only and are not to be construed as limiting the subject matter described. All documents, or portions of documents, cited in this application, including, but not limited to, patents, patent applications, articles, books, treatises, and GenBank, ENSEMBL, and NCBI reference sequence records, are hereby expressly incorporated-by-reference for the portions of the document discussed herein, as well as in their entirety.

### Definitions

[0010] Unless specific definitions are provided, the nomenclature used in connection with, and the procedures and techniques of, analytical chemistry, synthetic organic chemistry, and medicinal and pharmaceutical chemistry described herein are those well-known and commonly used in the art. Where permitted, all patents, applications, published applications and other publications and other data referred to throughout the disclosure are incorporated by reference herein in their entirety.

[0011] Unless otherwise indicated, the following terms have the following meanings:

[0012] As used herein, “2′-deoxynucleoside” means a nucleoside comprising a 2′-H(H) deoxyfuranosyl sugar moiety. In certain embodiments, a 2′-deoxynucleoside is a 2′-β-D-deoxynucleoside and comprises a 2′-β-D-deoxyribosyl sugar moiety, which has the β-D ribosyl configuration as found in naturally occurring deoxyribonucleic acids (DNA). In certain embodiments, a 2′-deoxynucleoside may comprise a modified nucleobase or may comprise an RNA nucleobase (uracil).

[0013] As used herein, “2′-MOE” means a 2′-OCH₂CH₂OCH₃ group in place of the 2′-OH group of a ribosyl sugar moiety. A “2′-MOE modified sugar moiety” means a sugar moiety with a 2′-OCH₂CH₂OCH₃ group in place of the 2′-OH group of a ribosyl sugar moiety. Unless otherwise indicated, a 2′-MOE modified sugar moiety is in the β-D-ribosyl configuration. “MOE” means O-methoxyethyl.

[0014] As used herein, “2′-MOE nucleoside” or “2′-MOE modified nucleoside” or “2′-O(CH₂)₂OCH₃ nucleoside” means a nucleoside comprising a 2′-MOE modified sugar moiety (or 2′-O(CH₂)₂OCH₃ ribosyl sugar moiety).

[0015] As used herein, “2′-OMe” means a 2′-OCH₃ group in place of the 2′-OH group of a ribosyl sugar moiety. A “2′-O-methyl sugar moiety” or “2′-OMe modified sugar moiety” means a sugar moiety with a 2′-OCH₃ group in place of the 2′-OH group of a ribosyl sugar moiety. Unless otherwise indicated, a 2′-OMe modified sugar moiety is in the β-D-ribosyl configuration.

[0016] As used herein, “2′-OMe nucleoside” or “2′-OMe modified nucleoside” means a nucleoside comprising a 2′-OMe modified sugar moiety.

[0017] As used herein, “2′-F” means a 2′-fluoro group in place of the 2′-OH group of a ribosyl sugar moiety. A “2′-F modified sugar moiety” or “2′-fluororibosyl sugar” means a sugar moiety with a 2′—F group in place of the 2′-OH group of a ribosyl sugar moiety. Unless otherwise indicated, a 2′-F modified sugar moiety is in the β-D-ribosyl configuration.

[0018] As used herein, “2′-F nucleoside” or “2′-F modified nucleoside” means a nucleoside comprising a 2′-F modified sugar moiety.

[0019] As used herein, “2′-substituted nucleoside” means a nucleoside comprising a 2′-substituted furanosyl sugar moiety. As used herein, “2′-substituted” in reference to a sugar moiety means a sugar moiety comprising at least one 2′-substituent group other than H or OH.

[0020] As used herein, “5-methylcytosine” means a cytosine modified with a methyl group attached to the 5 position. A 5-methylcytosine is a modified nucleobase.

[0021] As used herein, “abasic sugar moiety” means a sugar moiety of a nucleoside that is not attached to a nucleobase. Such abasic sugar moieties are sometimes referred to in the art as “abasic nucleosides.”

[0022] As used herein, “about” means within +10% of a value. For example, if it is stated, “the compounds affected about 70% reduction of GYS1”, it is implied that GYS1 levels are reduced within a range of 63% and 77%.

[0023] As used herein, “administration” or “administering” means providing a pharmaceutical agent or composition to a subject.

[0024] As used herein, “ameliorate” in reference to a treatment means improvement in at least one symptom or hallmark relative to the same symptom or hallmark in the absence of the treatment. In certain embodiments, amelioration is the reduction in the severity or frequency of a symptom or hallmark or the delayed onset of or slowing of progression in the severity or frequency of a symptom or hallmark. In certain embodiments, the symptom or hallmark is seizures, cognitive deterioration, neuromuscular weakness, myoclonus, dementia, ataxia, cerebellar dysfunction, impaired speech, loss of ambulation, swallowing difficulty, or epileptic episodes. The progression or severity of indicators may be determined by subjective or objective measures, which are known to those skilled in the art.

[0025] As used herein, “antisense activity” means any detectable and/or measurable change attributable to the hybridization of an antisense compound to its target nucleic acid. In certain embodiments, antisense activity is a decrease in the amount or expression of a target nucleic acid or protein encoded by such target nucleic acid compared to target nucleic acid levels or target protein levels in the absence of the antisense compound.

[0026] As used herein, “antisense agent” means an antisense compound and optionally one or more additional features, such as a sense compound.

[0027] As used herein, “antisense compound” means an antisense oligonucleotide and optionally one or more additional features, such as a conjugate group.

[0028] As used herein, “sense compound” means a sense oligonucleotide and optionally one or more additional features, such as a conjugate group.

[0029] As used herein, “antisense oligonucleotide” means an oligonucleotide, including the oligonucleotide portion of an antisense compound, that is capable of hybridizing to a target nucleic acid and is capable of at least one antisense activity. Antisense oligonucleotides include but are not limited to antisense RNAi oligonucleotides and antisense RNase H oligonucleotides.

[0030] As used herein, “sense oligonucleotide” means an oligonucleotide, including the oligonucleotide portion of a sense compound, that is capable of hybridizing to an antisense oligonucleotide.

[0031] As used herein, “Adult polyglucosan body disease” is characterized by dysfunction of the central and peripheral nervous systems. Associated symptoms and findings may include sensory loss in the legs, progressive muscle weakness of the arms and legs, gait disturbances, urination difficulties, and/or cognitive impairment or dementia.

[0032] As used herein, “Andersen's disease”, also known as glycogen storage disease type IV, is caused by deficient activity of the glycogen-branching enzyme, resulting in accumulation of abnormal glycogen in the liver, muscle, and other tissues. The disease course is typically characterized by progressive liver cirrhosis and liver failure. In some case, several neuromuscular variants of Andersen's disease occur that may be evident at birth, late childhood, or adulthood.

[0033] As used herein, “ataxia” means impaired motor coordination.

[0034] As used herein, “bicyclic nucleoside” or “BNA” means a nucleoside comprising a bicyclic sugar moiety.

[0035] As used herein, “bicyclic sugar” or “bicyclic sugar moiety” means a modified sugar moiety comprising two rings, wherein the second ring is formed via a bridge connecting two of the atoms in the first ring thereby forming a bicyclic structure. In certain embodiments, the first ring of the bicyclic sugar moiety is a furanosyl sugar moiety. In certain embodiments, the furanosyl sugar moiety is a ribosyl sugar moiety. In certain embodiments, the bicyclic sugar moiety does not comprise a furanosyl sugar moiety.

[0036] As used herein, “cell-targeting moiety” means a conjugate group or portion of a conjugate group that is capable of binding to a particular cell type or particular cell types.

[0037] As used herein, “cerebrospinal fluid” or “CSF” means the fluid filling the space around the brain and spinal cord. “Artificial cerebrospinal fluid” or “aCSF” means a prepared or manufactured fluid that has certain properties (e.g., osmolarity, pH, and/or electrolytes) similar to cerebrospinal fluid and is biocompatible with CSF.

[0038] As used herein, “chirally enriched population” means a plurality of molecules of identical molecular formula, wherein the number or percentage of molecules within the population that contain a particular stereochemical configuration at a particular chiral center is greater than the number or percentage of molecules expected to contain the same particular stereochemical configuration at the same particular chiral center within the population if the particular chiral center were stereorandom. Chirally enriched populations of molecules having multiple chiral centers within each molecule may contain one or more stereorandom chiral centers. In certain embodiments, the molecules are modified oligonucleotides. In certain embodiments, the molecules are compounds comprising modified oligonucleotides.

[0039] As used herein, “chirally controlled” in reference to an internucleoside linkage means chirality at that linkage is enriched for a particular stereochemical configuration.

[0040] As used herein, “cleavable moiety” means a bond or group of atoms that is cleaved under physiological conditions, for example, inside a cell, a subject, an animal, or a human.

[0041] As used herein, “complementary” in reference to an oligonucleotide means that at least 70% of the nucleobases of the oligonucleotide and the nucleobases of another nucleic acid or one or more portions thereof are capable of hydrogen bonding with one another when the nucleobase sequence of the oligonucleotide and the other nucleic acid are aligned in opposing directions. “Complementary region” in reference to a region of an oligonucleotide means that at least 70% of the nucleobases of that region and the nucleobases of another nucleic acid or one or more regions thereof are capable of hydrogen bonding with one another when the nucleobase sequence of the oligonucleotide and the other nucleic acid are aligned in opposing directions. “Complementary nucleobases” means nucleobases that are capable of forming hydrogen bonds with one another. Complementary nucleobase pairs include adenine (A) and thymine (T), adenine (A) and uracil (U), cytosine (C) and guanine (G), and 5-methylcytosine (^{m}C) and guanine (G). Certain modified nucleobases that pair with natural nucleobases or with other modified nucleobases are known in the art and are not considered complementary nucleobases as define dherein unless indicated otherwise. For example, inosine can pair, but is not considered complementary, with adenosine, cytosine, or uracil. Complementary oligonucleotides and/or target nucleic acids need not have nucleobase complementarity at each nucleoside. Rather, some mismatches are tolerated. As used herein, “fully complementary” or “100% complementary” in reference to an oligonucleotide, or a portion thereof, means that the oligonucleotide, or portion thereof, is complementary to another oligonucleotide or nucleic acid at each nucleobase of the oligonucleotide or nucleic acid.

[0042] As used herein, “conjugate group” means a group of atoms that is directly attached to an oligonucleotide. Conjugate groups include a conjugate moiety and a conjugate linker that attaches the conjugate moiety to the oligonucleotide.

[0043] As used herein, “conjugate linker” means a single bond or a group of atoms comprising at least one bond that connects a conjugate moiety to an oligonucleotide.

[0044] As used herein, “conjugate moiety” means a group of atoms that modifies one or more properties of a molecule compared to the identical molecule lacking the conjugate moiety, including but not limited to pharmacodynamics, pharmacokinetics, stability, binding, absorption, tissue distribution, cellular distribution, cellular uptake, charge and clearance.

[0045] As used herein, “contiguous” in the context of an oligonucleotide refers to nucleosides, nucleobases, sugar moieties, or internucleoside linkages that are immediately adjacent to each other. For example, “contiguous nucleobases” means nucleobases that are immediately adjacent to each other in a sequence.

[0046] As used herein, “constrained ethyl” or “cEt” or “cEt modified sugar moiety” means a β-D ribosyl bicyclic sugar moiety wherein the second ring of the bicyclic sugar is formed via a bridge connecting the 4′-carbon and the 2′-carbon of the β-D ribosyl sugar moiety, wherein the bridge has the formula 4′-CH(CH₃)—O-2′, and wherein the methyl group of the bridge is in the S configuration.

[0047] As used herein, “cEt nucleoside” means a nucleoside comprising a cEt modified sugar moiety.

[0048] As used herein, “deoxy region” means a region of 5-12 contiguous nucleotides, wherein at least 70% of the nucleosides comprise a 2′-β-D-deoxyribosyl sugar moiety. In certain embodiments, a deoxy region is the gap of a gapmer.

[0049] As used herein, “dementia” means a loss of intellectual function that impairs memory, judgment, or thought.

[0050] As used herein, “diluent” means an ingredient in a composition that lacks pharmacological activity, but is pharmaceutically necessary or desirable. For example, the diluent in an injected composition can be a liquid, e.g. aCSF, PBS, or saline solution.

[0051] As used herein, “epilepsy” is a central nervous system disorder in which nerve cell activity in the brain becomes chronically hyperexcitable. This predisposes to recurrent episodes of seizures, which may be associated with focal or generalized motor and/or sensory disturbances as well as loss of consciousness. In certain instances, it may also be associated and/or cause other symptoms including myoclonus, cognitive deficits, learning disabilities, or developmental delay in children. In certain instances, it may lead to death in some patients. In certain instances, some forms of epilepsy are associated with progressive neurodegenerative diseases. Many people with epilepsy have more than one symptom.

[0052] As used herein, “gapmer” means a modified oligonucleotide comprising an internal region positioned between external regions having one or more nucleosides, wherein the nucleosides comprising the internal region are chemically distinct from the nucleoside or nucleosides comprising the external regions, and wherein the modified oligonucleotide supports RNase H cleavage. The internal region may be referred to as the “gap” and the external regions may be referred to as the “wing.” In certain embodiments, the internal region is a deoxy region. The positions of the internal region or gap refer to the order of the nucleosides of the internal region and are counted starting from the 5′-end of the internal region. Unless otherwise indicated, “gapmer” refers to a sugar motif. In certain embodiments, the sugar moiety of each nucleoside of the gap is a 2′-β-D-deoxyribosyl sugar moiety. In certain embodiments, the gap comprises one 2′-substituted nucleoside at position 1, 2, 3, 4, or 5 of the gap, and the remainder of the nucleosides of the gap are 2′-β-D-deoxynucleosides. As used herein, the term “MOE gapmer” indicates a gapmer having a gap comprising 2′-β-D-deoxynucleosides and wings comprising 2′-MOE nucleosides. As used herein, the term “mixed wing gapmer” indicates a gapmer having wings comprising modified nucleosides comprising at least two different sugar modifications. Unless otherwise indicated, a gapmer may comprise one or more modified internucleoside linkages and/or modified nucleobases and such modifications do not necessarily follow the gapmer pattern of the sugar modifications.

[0053] As used herein, “glycogen” is a polysaccharide that is the principal storage form of glucose in animals. Glycogen is found in the form of granules in the cystosol in a variety of tissues, including brain.

[0054] As used herein, “GYS1-specific inhibitor” refers to any agent capable of specifically reducing GYS1 expression or activity at the molecular level. For example, GYS1-specific inhibitors include nucleic acids (including antisense compounds), peptides, antibodies, small molecules, and other agents capable of reducing the expression or activity of GYS1.

[0055] As used herein, “hotspot region” is a range of nucleobases on a target nucleic acid that is amenable to oligomeric agent or oligomeric compound-mediated reduction of the amount or activity of the target nucleic acid.

[0056] As used herein, “hybridization” means the annealing of oligonucleotides and/or nucleic acids. While not limited to a particular mechanism, the most common mechanism of hybridization involves hydrogen bonding, which may be Watson-Crick, Hoogsteen or reversed Hoogsteen hydrogen bonding, between complementary nucleobases. In certain embodiments, complementary nucleic acid molecules include, but are not limited to, an antisense compound and a nucleic acid target. In certain embodiments, complementary nucleic acid molecules include, but are not limited to, an oligonucleotide and a nucleic acid target.

[0057] As used herein, “internucleoside linkage” is the covalent linkage between adjacent nucleosides in an oligonucleotide. As used herein, “modified internucleoside linkage” means any internucleoside linkage other than a phosphodiester internucleoside linkage. “Phosphorothioate internucleoside linkage” or “PS internucleoside linkage” is a modified internucleoside linkage in which one of the non-bridging oxygen atoms of a phosphodiester internucleoside linkage is replaced with a sulfur atom.

[0058] As used herein, “inverted nucleoside” means a nucleotide having a 3′ to 3′ and/or 5′ to 5′ internucleoside linkage, as shown herein.

[0059] As used herein, “inverted sugar moiety” means the sugar moiety of an inverted nucleoside or an abasic sugar moiety having a 3′ to 3′ and/or 5′ to 5′ internucleoside linkage.

[0060] As used herein, “Lafora bodies” are neurotoxic inclusions formed as a result of the formation of abnormal glycogen and its precipitation and accumulation to form polyglucosan.

[0061] As used herein, “Lafora disease” (LD) is a severe and universally fatal form of adolescence-onset epilepsy resulting from accumulation of Lafora bodies in neurons, muscle, and other tissues. It is characterized by progressive worsening of seizures, myoclonus, cognitive decline, ataxia and speech and swallowing difficulties. Patients ultimately become wheelchair bound, mute, unable to swallow (need gastrostomy feeding), with profound dementia and myoclonic status, and all die usually within 5-10 years from disease onset.

[0062] As used herein, “linked nucleosides” are nucleosides that are connected in a contiguous sequence (i.e., no additional nucleosides are presented between those that are linked).

[0063] As used herein, “linker-nucleoside” means a nucleoside that links, either directly or indirectly, an oligonucleotide to a conjugate moiety. Linker-nucleosides are located within the conjugate linker of an oligomeric compound. Linker-nucleosides are not considered part of the oligonucleotide portion of an oligomeric compound even if they are contiguous with the oligonucleotide.

[0064] As used herein, “mismatch” or “non-complementary” means a nucleobase of a first nucleic acid sequence that is not complementary with the corresponding nucleobase of a second nucleic acid sequence or target nucleic acid when the first and second nucleic acid sequences are aligned in opposing directions.

[0065] As used herein, “motif” means the pattern of unmodified and/or modified sugar moieties, nucleobases, and/or internucleoside linkages, in an oligonucleotide.

[0066] As used herein, “myoclonus” means episodes of repeated, stereotypic, involuntary muscle jerking or twitching that can affect part of the body or the entire body for variable durations.

[0067] As used herein, “non-bicyclic modified sugar moiety” means a modified sugar moiety that comprises a modification, such as a substituent, that does not form a bridge between two atoms of the sugar to form a second ring.

[0068] As used herein, “nucleobase” means an unmodified nucleobase or a modified nucleobase. A nucleobase is a heterocyclic moiety. As used herein an “unmodified nucleobase” is adenine (A), thymine (T), cytosine (C), uracil (U), or guanine (G). As used herein, a “modified nucleobase” is a group of atoms other than unmodified A, T, C, U, or G capable of pairing with at least one unmodified nucleobase. A “5-methylcytosine” is a modified nucleobase. A universal base is a modified nucleobase that can pair with any one of the five unmodified nucleobases.

[0069] As used herein, “nucleobase sequence” means the order of contiguous nucleobases in a nucleic acid or oligonucleotide independent of any sugar or internucleoside linkage modification.

[0070] As used herein, “nucleoside” means a compound, or a fragment of a compound, comprising a nucleobase and a sugar moiety. The nucleobase and sugar moiety are each, independently, unmodified or modified. As used herein, “modified nucleoside” means a nucleoside comprising a modified nucleobase and/or a modified sugar moiety. Modified nucleosides include abasic nucleosides, which lack a nucleobase. “Linked nucleosides” are nucleosides that are connected in a contiguous sequence (i.e., no additional nucleosides are presented between those that are linked).

[0071] As used herein, “oligomeric agent” means an oligomeric compound and optionally one or more additional features, such as a second oligomeric compound. An oligomeric agent may be a single-stranded oligomeric compound or may be an oligomeric duplex formed by two complementary oligomeric compounds.

[0072] As used herein, “oligomeric compound” means an oligonucleotide and optionally one or more additional features, such as a conjugate group or terminal group. An oligomeric compound may be paired with a second oligomeric compound that is complementary to the first oligomeric compound or may be unpaired. A “singled-stranded oligomeric compound” is an unpaired oligomeric compound.

[0073] The term “oligomeric duplex” means a duplex formed by two oligomeric compounds having complementary nucleobase sequences.

[0074] As used herein, “oligonucleotide” means a strand of linked nucleosides connected via internucleoside linkages, wherein each nucleoside and internucleoside linkage may be modified or unmodified. Unless otherwise indicated, oligonucleotides consist of 8-50 linked nucleosides. As used herein, “modified oligonucleotide” means an oligonucleotide, wherein at least one nucleoside or internucleoside linkage is modified. As used herein, “unmodified oligonucleotide” means an oligonucleotide that does not comprise any nucleoside modifications or internucleoside modifications. An oligonucleotide may be paired with a second oligonucleotide that is complementary to the oligonucleotide or it may be unpaired. A “single-stranded oligonucleotide” is an unpaired oligonucleotide. A “double-stranded oligonucleotide” is an oligonucleotide that is paired with a second oligonucleotide.

[0075] As used herein, “pharmaceutically acceptable carrier or diluent” means any substance suitable for use in administering to an animal. Certain such carriers enable pharmaceutical compositions to be formulated as, for example, tablets, pills, dragees, capsules, liquids, gels, syrups, slurries, suspension and lozenges for the oral ingestion by an animal. In certain embodiments, a pharmaceutically acceptable carrier or diluent is sterile water, sterile saline, sterile buffer solution or sterile artificial cerebrospinal fluid.

[0076] As used herein, “pharmaceutically acceptable salts” means physiologically and pharmaceutically acceptable salts of compounds. Pharmaceutically acceptable salts retain the desired biological activity of the parent compound and do not impart undesired toxicological effects thereto.

[0077] As used herein, “pharmaceutical composition” means a mixture of substances suitable for administering to a subject. For example, a pharmaceutical composition may comprise an oligomeric compound and a sterile aqueous solution. In certain embodiments, a pharmaceutical composition shows activity in free uptake assay in certain cell lines.

[0078] As used herein, “Pompe disease” also called glycogen storage disease type II, is a neuromuscular disorder caused by buildup of glycogen in the body's cells. Pompe disease is a single disease continuum with variable rates of disease progression and different ages of onset. The first symptoms can occur at any age from birth to late adulthood.

[0079] As used herein, “prevent” refers to a delaying or forestalling of the onset, development, or progression of a disease, disorder, or condition for a period of time, e.g., from minutes to indefinitely.

[0080] As used herein, “prodrug” means a therapeutic agent in a first form outside the body that is converted to a second form within an animal or cells thereof. Typically, conversion of a prodrug within the animal is facilitated by the action of an enzymes (e.g., endogenous or viral enzyme) or chemicals present in cells or tissues and/or by physiologic conditions. In certain embodiments, the first form of the prodrug is less active than the second form.

[0081] As used herein, “reducing or inhibiting the amount or activity” refers to a reduction or blockade of the transcriptional expression or activity relative to the transcriptional expression or activity in an untreated or control sample and does not necessarily indicate a total elimination of transcriptional expression or activity.

[0082] As used herein, “RNA” means an RNA transcript and includes pre-mRNA and mature mRNA unless otherwise specified.

[0083] As used herein, “RNAi agent” means an antisense agent that acts, at least in part, through RISC or Ago2 to modulate a target nucleic acid and/or protein encoded by a target nucleic acid. RNAi agents include, but are not limited to double-stranded siRNA, single-stranded RNA (ssRNAi), and microRNA, including microRNA mimics. RNAi agents may comprise conjugate groups and/or terminal groups. In certain embodiments, an RNAi agent modulates the amount, activity, and/or splicing of a target nucleic acid. The term RNAi agent excludes antisense agents that act through RNase H.

[0084] As used herein, “RNase H agent” means an antisense agent that acts through RNase H to modulate a target nucleic acid and/or protein encoded by a target nucleic acid. In certain embodiments, RNase H agents are single-stranded. In certain embodiments, RNase H agents are double-stranded. RNase H agents may comprise conjugate groups and/or terminal groups. In certain embodiments, an RNase H agent modulates the amount and/or activity of a target nucleic acid. The term RNase H agent excludes antisense agents that act principally through RISC/Ago2.

[0085] As used herein, “self-complementary” in reference to an oligonucleotide means an oligonucleotide that at least partially hybridizes to itself.

[0086] As used herein, “seizures” are a symptom of many different disorders and conditions that can affect the brain. “Seizures” are typically caused by dysfunction in the electric communication between neurons in the brain, resulting from a brain injury or an underlying disease or disorder, such as a genetic condition, for example. In patients with a seizure disorder, neurons are hyperexcitable with a propensity to increased epileptiform discharges and spontaneous firing which can intermittently culminate in a seizure episode. Seizures can take on different forms and affect people in different ways. Common physical changes that may occur during a seizure are difficulty talking, inability to swallow, drooling, repeated blinking of the eyes, staring, lack of movement of muscle tone, slumping tremors, twitching, or jerking movements, rigid or tense muscles, repeated non-purposeful movements, called automatisms, involving the face, arms, or legs, convulsions, loss of control of urine or stool, sweating, change in skin color (paleness or flushing), dilation of pupils, biting of tongue, difficulty breathing, heart palpitations. In some embodiments, seizures are mild. In other embodiments, seizures are completely disabling or may result in death. Abnormal brain activity can often be documented by abnormal findings on an electroencephalogram (EEG) with epileptiform wave forms indicative of the underlying hyperexcitable seizure phenotype.

[0087] As used herein, “single-stranded” means a nucleic acid (including but not limited to an oligonucleotide) that is unpaired and is not part of a duplex. Single-stranded compounds are capable of hybridizing with complementary nucleic acids to form duplexes, at which point they are no longer single-stranded.

[0088] As used herein, “stabilized phosphate group” means a 5′-phosphate analog that is metabolically more stable than a 5′-phosphate as naturally occurs on DNA or RNA.

[0089] As used herein, “standard in vitro assay” means the assays described in Examples 1-3 and reasonable variations thereof.

[0090] As used herein, “stereorandom chiral center” in the context of a population of molecules of identical molecular formula means a chiral center having a random stereochemical configuration. For example, in a population of molecules comprising a stereorandom chiral center, the number of molecules having the (S) configuration of the stereorandom chiral center may be but is not necessarily the same as the number of molecules having the (R) configuration of the stereorandom chiral center. The stereochemical configuration of a chiral center is considered random when it is the result of a synthetic method that is not designed to control the stereochemical configuration. In certain embodiments, a stereorandom chiral center is a stereorandom phosphorothioate internucleoside linkage.

[0091] As used herein, “subject” means a human or non-human animal. In certain embodiments, the subject is a human.

[0092] As used herein, “sugar moiety” means an unmodified sugar moiety or a modified sugar moiety. As used herein, “unmodified sugar moiety” means a 2′-OH(H) β-D-ribosyl moiety, as found in RNA (an “unmodified RNA sugar moiety”), or a 2′-H(H) β-D-deoxyribosyl sugar moiety, as found in DNA (an “unmodified DNA sugar moiety”). Unmodified sugar moieties have one hydrogen at each of the 1′, 3′, and 4′ positions, an oxygen at the 3′ position, and two hydrogens at the 5′ position. As used herein, “modified sugar moiety” or “modified sugar” means a modified furanosyl sugar moiety or a sugar surrogate.

[0093] As used herein, “sugar surrogate” means a modified sugar moiety having other than a furanosyl moiety that can link a nucleobase to another group, such as an internucleoside linkage, conjugate group, or terminal group in an oligonucleotide. Modified nucleosides comprising sugar surrogates can be incorporated into one or more positions within an oligonucleotide and such oligonucleotides are capable of hybridizing to complementary oligomeric compounds or target nucleic acids.

[0094] As used herein, “symptom or hallmark” means any physical feature or test result that indicates the existence or extent of a disease or disorder. In certain embodiments, a symptom is apparent to a subject or to a medical professional examining or testing the subject. In certain embodiments, a hallmark is apparent upon invasive diagnostic testing, including, but not limited to, post-mortem tests. In certain embodiments, a hallmark is apparent on a brain MRI scan.

[0095] As used herein, “target nucleic acid” and “target RNA” mean a nucleic acid that an antisense compound is designed to affect. Target RNA means an RNA transcript and includes pre-mRNA and mRNA unless otherwise specified.

[0096] As used herein, “target region” means a portion of a target nucleic acid to which an oligomeric compound is designed to hybridize.

[0097] As used herein, “terminal group” means a chemical group or group of atoms that is covalently linked to a terminus of an oligonucleotide.

[0098] As used herein, “treating” means improving a subject's disease or condition by administering an oligomeric agent or oligomeric compound described herein. In certain embodiments, treating a subject improves a symptom relative to the same symptom in the absence of the treatment. In certain embodiments, treatment reduces in the severity or frequency of a symptom, or delays the onset of a symptom, slows the progression of a symptom, or slows the severity or frequency of a symptom.

[0099] As used herein, “therapeutically effective amount” means an amount of a pharmaceutical agent that provides a therapeutic benefit to a subject. For example, a therapeutically effective amount improves a symptom of a disease.

### CERTAIN EMBODIMENTS

[0100] The present disclosure provides the following non-limiting numbered embodiments:

[0101] Embodiment 1. An oligomeric compound comprising a modified oligonucleotide consisting of 12 to 30 linked nucleosides wherein the nucleobase sequence of the modified oligonucleotide is at least 80% complementary to an equal length portion of a GYS1 nucleic acid, and wherein the modified oligonucleotide comprises at least one modification selected from a modified sugar moiety and a modified internucleoside linkage.

[0102] Embodiment 2. An oligomeric compound comprising a modified oligonucleotide consisting of 12 to 30 linked nucleosides and having a nucleobase sequence comprising at least 12, at least 13, at least 14, at least 15, at least 16, at least 17, at least 18, at least 19, or 20 contiguous nucleobases of any of the nucleobase sequences of SEQ ID NOs: 19-3023, wherein the modified oligonucleotide comprises at least one modification selected from a modified sugar moiety and a modified internucleoside linkage.

[0103] Embodiment 3. An oligomeric compound comprising a modified oligonucleotide consisting of 12 to 30 linked nucleosides and having a nucleobase sequence comprising at least 8, at least 9, at least 10, at least 11, at least 12, at least 13, at least 14, at least 15, at least 16, at least 17, at least 18, at least 19, or 20 contiguous nucleobases complementary to:
[0104] an equal length portion of nucleobases 244-271 of SEQ ID NO: 1;
[0105] an equal length portion of nucleobases 289-317 of SEQ ID NO: 1;
[0106] an equal length portion of nucleobases 391-434 of SEQ ID NO: 1;
[0107] an equal length portion of nucleobases 1191-1230 of SEQ ID NO: 1;
[0108] an equal length portion of nucleobases 2633-2686 of SEQ ID NO: 1;
[0109] an equal length portion of nucleobases 2727-2764 of SEQ ID NO: 1;
[0110] an equal length portion of nucleobases 2809-2851 of SEQ ID NO: 1;
[0111] an equal length portion of nucleobases 3277-3326 of SEQ ID NO: 1;
[0112] an equal length portion of nucleobases 3341-3385 of SEQ ID NO: 1;
[0113] an equal length portion of nucleobases 3565-3591 of SEQ ID NO: 1;
[0114] an equal length portion of nucleobases 3239-3298 of SEQ ID NO: 2;
[0115] an equal length portion of nucleobases 3324-3389 of SEQ ID NO: 2;
[0116] an equal length portion of nucleobases 3576-3612 of SEQ ID NO: 2;
[0117] an equal length portion of nucleobases 5310-5350 of SEQ ID NO: 2;
[0118] an equal length portion of nucleobases 5706-5762 of SEQ ID NO: 2;
[0119] an equal length portion of nucleobases 5914-5948 of SEQ ID NO: 2;
[0120] an equal length portion of nucleobases 6189-6221 of SEQ ID NO: 2;
[0121] an equal length portion of nucleobases 6986-7034 of SEQ ID NO: 2;
[0122] an equal length portion of nucleobases 7803-7844 of SEQ ID NO: 2;
[0123] an equal length portion of nucleobases 8371-8400 of SEQ ID NO: 2;
[0124] an equal length portion of nucleobases 8514-8555 of SEQ ID NO: 2;
[0125] an equal length portion of nucleobases 8826-8857 of SEQ ID NO: 2;
[0126] an equal length portion of nucleobases 12100-12138 of SEQ ID NO: 2;
[0127] an equal length portion of nucleobases 12350-12385 of SEQ ID NO: 2;
[0128] an equal length portion of nucleobases 12612-12659 of SEQ ID NO: 2;
[0129] an equal length portion of nucleobases 15653-15688 of SEQ ID NO: 2;
[0130] an equal length portion of nucleobases 15801-15845 of SEQ ID NO: 2;
[0131] an equal length portion of nucleobases 16745-16800 of SEQ ID NO: 2;
[0132] an equal length portion of nucleobases 16828-16864 of SEQ ID NO: 2;
[0133] an equal length portion of nucleobases 16856-16910 of SEQ ID NO: 2;
[0134] an equal length portion of nucleobases 16915-16947 of SEQ ID NO: 2;
[0135] an equal length portion of nucleobases 19917-19980 of SEQ ID NO: 2;
[0136] an equal length portion of nucleobases 24606-24665 of SEQ ID NO: 2; or
[0137] an equal length portion of SEQ ID NO: 3024,
   wherein the modified oligonucleotide comprises at least one modification selected from a modified sugar moiety and a modified internucleoside linkage.

[0138] Embodiment 4. An oligomeric compound comprising a modified oligonucleotide consisting of 12 to 30 linked nucleosides and having a nucleobase sequence comprising at least 8, at least 9, at least 10, at least 11, at least 12, at least 13, at least 14, at least 15, at least 16, at least 17, at least 18, at least 19, or 20 contiguous nucleobases of a sequence selected from:
[0139] SEQ ID NOs: 102, 1406, 1479, 1556, 1633, 1710, 1787, 1863, and 179;
[0140] SEQ ID NOs: 256, 1939, 2015, 2092, 2169, 333, and 2246;
[0141] SEQ ID NOs: 792, 26, 869, 946, 1023, 104, and 1100;
[0142] SEQ ID NOs: 344, 1181, 421, 1257, 37, and 1334;
[0143] SEQ ID NOs: 1724, 56, 1877, 1953, 2029, 2106, 2183, 2260, 2337, 2414, 133, and 2491;
[0144] SEQ ID NOs: 2721, 2797, 2874, 210, 500, 577, 654, 730, 806, 883, 960, 287, 364, 1037, 1114, 1191, and 1267;
[0145] SEQ ID NOs: 1344, 1421, 1494, 1571, 1648, and 441;
[0146] SEQ ID NOs: 2723, 2800, 2877, 503, 61, 580, 657, 138, and 733;
[0147] SEQ ID NOs: 1194, 1270, 1347, 446, 1424, 1497, 1574, and 1651;
[0148] SEQ ID NOs: 140, 1348, 217, 1498, and 1575;
[0149] SEQ ID NOs: 1273, 1350, 1426, 1500, 1577, 1654, 1731, 1807, 372, and 1960;
[0150] SEQ ID NOs: 2498, 2575, 2652, 2727, 2804, 2881, 507, 584, 661, 737, 813, 890, 967, 1044, 1121, 65, 1198, 1274, 1351, 1427, 1501, 1578, 1655, 1732, 1808, 1884, 1961, 2037, 2114, 2191, 2268, 2345, 2422, 2499, and 2576;
[0151] SEQ ID NOs: 1353, 373, 1503, 1580, 1657, 1734, 1810, 1886, 1963, 2039, 2116, 2193, 2270, 2347, and 450;
[0152] SEQ ID NOs: 2044, 2121, 2198, 2275, 2352, 2429, and 2506;
[0153] SEQ ID NOs: 2584, 70, and 2736;
[0154] SEQ ID NOs: 2508, 2585, 2661, 2737, 2814, 2891, 517, and 594;
[0155] SEQ ID NOs: 2201, 2278, 2355, 2432, 2509, 2586, 2662, 2738, 2815, 302, and 2892;
[0156] SEQ ID NOs: 1743, 1819, 1895, 1972, 2048, 456, 2125, 2202, 2279, and 2356;
[0157] SEQ ID NOs: 1513, 1590, 1667, and 1744;
[0158] SEQ ID NOs: 2511, 2588, 2664, 2740, 2817, 2894, 520, 597, 3021, 673, 3022, and 750;
[0159] SEQ ID NOs: 1514, 1591, 1668, 1745, 73, 1821, and 1897;
[0160] SEQ ID NOs: 2818, 2895, 521, 598, 674, 751, and 827;
[0161] SEQ ID NOs: 2674, 2750, 2827, and 2904;
[0162] SEQ ID NOs: 914, 991, 1068, 1145, and 1222;
[0163] SEQ ID NOs: 532, 2976, 2964, 609, 310, 685, 2972, 2988, 2993, 2959, 762, 2968, 838, 915, 992, 1069, 2973, 2992, and 1146;
[0164] SEQ ID NOs: 1303, 83, 1380, 1454, 2954, 2947, 1530, 1607, 1684, 1761, 1837, 2951, 2949, 2944, 2943, 1913, and 1990;
[0165] SEQ ID NOs: 314, 843, 920, 997, and 1074;
[0166] SEQ ID NOs: 1303, 83, 1380, 1454, 1530, 1607, 1684, 1761, 1837, 1913, and 1990;
[0167] SEQ ID NOs: 2954, 2947, 2951, 2949, 2944, and 2943;
[0168] SEQ ID NOs: 2682, 2758, 2835, 2912, 538, 615, 691, 767, 844, 921, 998, 1075, 1152, 161, and 1305;
[0169] SEQ ID NOs: 1382, 1456, and 1532;
[0170] SEQ ID NOs: 1915, 469, 2068, 2979, 2967, 2958, 2938, 2939, 2940, 2997, 2996, 2941, 2995, 2974, 2970, 2980, 2971, 2961, 2984, 2957, and 2145;
[0171] SEQ ID NOs: 2376, 2453, 2530, 2607, 2683, 2759, 2836, 2913, 539, and 616;
[0172] SEQ ID NOs: 1390, 1464, 1540, 243, 1617, and 1694; or
[0173] SEQ ID NOs: 2621, 2697, 2773, 2850, and 2927;
   wherein the modified oligonucleotide comprises at least one modification selected from a modified sugar moiety and a modified internucleoside linkage.

[0174] Embodiment 5. The oligomeric compound of any of embodiments 1-4, wherein the modified oligonucleotide has a nucleobase sequence that is at least 85%, at least 90%, at least 95%, or 100% complementary to the nucleobase sequence of any one of SEQ ID NOs: 1-10 and 14 when measured across the entire nucleobase sequence of the modified oligonucleotide.

[0175] Embodiment 6. The oligomeric compound of any of embodiments 1-5, wherein the modified oligonucleotide comprises at least one modified nucleoside.

[0176] Embodiment 7. The oligomeric compound of any of embodiments 1-6, wherein the modified oligonucleotide comprises at least one modified nucleoside comprising a modified sugar moiety.

[0177] Embodiment 8. The oligomeric compound of embodiment 7, wherein the modified oligonucleotide comprises at least one modified nucleoside comprising a bicyclic sugar moiety.

[0178] Embodiment 9. The oligomeric compound of embodiment 8, wherein the bicyclic sugar moiety has a 2′-4′ bridge selected from —O—CH₂—; and —O—CH(CH₃)—.

[0179] Embodiment 10. The oligomeric compound of any of embodiments 6-9, wherein the modified oligonucleotide comprises at least one modified nucleoside comprising a non-bicyclic modified sugar moiety.

[0180] Embodiment 11. The oligomeric compound of embodiment 10, wherein the non-bicyclic modified sugar moiety is a 2′-O(CH₂)₂OCH₃ ribosyl sugar moiety or a 2′-OMe modified sugar moiety.

[0181] Embodiment 12. The oligomeric compound of any of embodiments 6-11, wherein the modified oligonucleotide comprises at least one modified nucleoside comprising a sugar surrogate.

[0182] Embodiment 13. The oligomeric compound of embodiment 12, wherein the sugar surrogate is any of morpholino, modified morpholino, PNA, THP, and F-HNA.

[0183] Embodiment 14. The oligomeric compound of any of embodiments 1-13, wherein the modified oligonucleotide is a gapmer.

[0184] Embodiment 15. The oligomeric compound of any of embodiments 1-14, wherein the modified oligonucleotide comprises at least one modified internucleoside linkage.

[0185] Embodiment 16. The oligomeric compound of embodiment 15, wherein each internucleoside linkage of the modified oligonucleotide is a modified internucleoside linkage.

[0186] Embodiment 17. The oligomeric compound of embodiment 15 or embodiment 16, wherein at least one internucleoside linkage is a phosphorothioate internucleoside linkage.

[0187] Embodiment 18. The oligomeric compound of embodiment 15 or embodiment 17, wherein the modified oligonucleotide comprises at least one phosphodiester internucleoside linkage.

[0188] Embodiment 19. The oligomeric compound of any of embodiments 15 or 17-18, wherein each internucleoside linkage is independently selected from a phosphodiester internucleoside linkage or a phosphorothioate internucleoside linkage.

[0189] Embodiment 20. The oligomeric compound of any of embodiments 15 or 17-19, wherein at least 4, at least 5, at least 6, at least 7, at least 8, at least 9, at least 10, at least 11, at least 12, at least 13, at least 14, at least 15, at least 16, at least 17, at least 18, or at least 19 internucleoside linkages of the modified oligonucleotide are phosphorothioate internucleoside linkages.

[0190] Embodiment 21. The oligomeric compound of any of embodiments 1-15 or 17-20, wherein the internucleoside linkage motif of the modified oligonucleotide is selected from: 5′-soooosssssssssssooss-3′, 5′-sososssssssssssooss-3′, 5′-sooosssssssssssooss-3′, 5′-soooossssssssssooss-3′, 5′-sooosssssssssssooos-3′, 5′-sooossssssssssooss-3′, and 5′-sooooossssssssssoss-3′; wherein each “s” represents a phosphorothioate internucleoside linkage and each “o” represents a phosphodiester internucleoside linkage.

[0191] Embodiment 22. The oligomeric compound of any of embodiments 1-21, wherein the modified oligonucleotide comprises at least one modified nucleobase.

[0192] Embodiment 23. The oligomeric compound of embodiment 22, wherein the modified nucleobase is a 5-methylcytosine.

[0193] Embodiment 24. The oligomeric compound of any of embodiments 1-23, wherein the modified oligonucleotide comprises a deoxy region.

[0194] Embodiment 25. The oligomeric compound of embodiment 24, wherein each nucleoside of the deoxy region is a 2′-deoxynucleoside.

[0195] Embodiment 26. The oligomeric compound of embodiment 24 or embodiment 25, wherein the deoxy region consists of 6, 7, 8, 9, 10, or 6-10 linked nucleosides.

[0196] Embodiment 27. The oligomeric compound of any of embodiments 24-26, wherein each nucleoside immediately adjacent to the deoxy region comprises a modified sugar moiety.

[0197] Embodiment 28. The oligomeric compound of any of embodiments 24-27, wherein the deoxy region is flanked on the 5′-side by a 5′-region consisting of 1-6 linked 5′-region nucleosides and on the 3′-side by a 3′-region consisting of 1-6 linked 3′-region nucleosides; wherein at least one nucleoside of the 5′-region comprises a modified sugar moiety; and at least one nucleoside of the 3′-region comprises a modified sugar moiety.

[0198] Embodiment 29. The oligomeric compound of embodiment 28, wherein each nucleoside of the 5′-region comprises a modified sugar moiety.

[0199] Embodiment 30. The oligomeric compound of embodiment 28 or embodiment 29, wherein each nucleoside of the 3′-region comprises a modified sugar moiety.

[0200] Embodiment 31. The oligomeric compound of any of embodiments 1-30, wherein the modified oligonucleotide consists of 12-30, 12-22, 12-20,14-18, 14-20, 15-17, 15-25, 16-20, 18-22, or 18-20 linked nucleosides.

[0201] Embodiment 32. The oligomeric compound of any of embodiments 1-31, wherein the modified oligonucleotide is a pharmaceutically acceptable salt.

[0202] Embodiment 33. The oligomeric compound of embodiment 32, wherein the modified oligonucleotide is a pharmaceutically acceptable salt comprising one or more cations selected from sodium, potassium, calcium, and magnesium.

[0203] Embodiment 34. The oligomeric compound of any of embodiments 1-33, wherein the modified oligonucleotide consists of 16, 17, 18, 19, or 20 linked nucleosides.

[0204] Embodiment 35. The oligomeric compound of any of embodiments 1-34, wherein the modified oligonucleotide consists of 20 linked nucleosides.

[0205] Embodiment 36. The oligomeric compound of any of embodiments 1-35, wherein the modified oligonucleotide has a sugar motif comprising:
[0206] a 5′-region consisting of 1-6 linked 5′-region nucleosides;
[0207] a central region consisting of 6-10 linked central region nucleosides; and
[0208] a 3′-region consisting of 1-6 linked 3′-region nucleosides; wherein
[0209] each of the 5′-region nucleosides and each of the 3′-region nucleosides comprises a modified sugar moiety and at least one of the central region nucleosides comprises a 2′-β-D-deoxyribosyl sugar moiety.

[0210] Embodiment 37. The oligomeric compound of any of embodiments 1-35, wherein the modified oligonucleotide has a sugar motif comprising:
[0211] a 5′-region consisting of 1-6 linked 5′-region nucleosides;
[0212] a central region consisting of 6-10 linked central region nucleosides; and
[0213] a 3′-region consisting of 1-6 linked 3′-region nucleosides; wherein
[0214] each of the 5′-region nucleosides and each of the 3′-region nucleosides comprises a modified sugar moiety and at least 6 of the central region nucleosides comprises a 2′-β-D-deoxyribosyl sugar moiety.

[0215] Embodiment 38. The oligomeric compound of any of embodiments 1-35, wherein the modified oligonucleotide has a sugar motif comprising:
[0216] a 5′-region consisting of 1-6 linked 5′-region nucleosides;
[0217] a central region consisting of 6-10 linked central region nucleosides; and
[0218] a 3′-region consisting of 1-6 linked 3′-region nucleosides; wherein
[0219] each of the 5′-region nucleosides and each of the 3′-region nucleosides comprises a modified sugar moiety and each of the central region nucleosides comprises a 2′-β-D-deoxyribosyl sugar moiety.

[0220] Embodiment 39. The oligomeric compound of embodiment 38, wherein the modified oligonucleotide has a sugar motif comprising:
[0221] a 5′-region consisting of 5 linked 5′-region nucleosides;
[0222] a central region consisting of 10 linked central region nucleosides; and
[0223] a 3′-region consisting of 5 linked 3′-region nucleosides; wherein
[0224] each of the 5′-region nucleosides and each of the 3′-region nucleosides comprises a 2′-O(CH₂)₂OCH₃ ribosyl sugar moiety, and each of the central region nucleosides comprises a 2′-β-D-deoxyribosyl sugar moiety.

[0225] Embodiment 40. The oligomeric compound of embodiment 38, wherein the modified oligonucleotide has a sugar motif comprising:
[0226] a 5′-region consisting of 6 linked 5′-region nucleosides;
[0227] a central region consisting of 10 linked central region nucleosides; and
[0228] a 3′-region consisting of 4 linked 3′-region nucleosides; wherein
[0229] each of the 5′-region nucleosides and each of the 3′-region nucleosides comprises a 2′-O(CH₂)₂OCH₃ ribosyl sugar moiety, and each of the central region nucleosides comprises a 2′-β-D-deoxyribosyl sugar moiety.

[0230] Embodiment 41. The oligomeric compound of embodiment 38, wherein the modified oligonucleotide has a sugar motif comprising:
[0231] a 5′-region consisting of 5 linked 5′-region nucleosides;
[0232] a central region consisting of 9 linked central region nucleosides; and
[0233] a 3′-region consisting of 5 linked 3′-region nucleosides; wherein
[0234] each of the 5′-region nucleosides and each of the 3′-region nucleosides comprises a 2′-O(CH₂)₂OCH₃ ribosyl sugar moiety, and each of the central region nucleosides comprises a 2′-β-D-deoxyribosyl sugar moiety.

[0235] Embodiment 42. The oligomeric compound of any of embodiments 1-41, consisting of the modified oligonucleotide.

[0236] Embodiment 43. The oligomeric compound of any of embodiments 1-41, wherein the oligomeric compound comprises a conjugate group.

[0237] Embodiment 44. The oligomeric compound of embodiment 43, wherein the conjugate group comprises a conjugate linker and a conjugate moiety.

[0238] Embodiment 45. The oligomeric compound of embodiment 43 or embodiment 44, wherein the conjugate linker consists of a single bond.

[0239] Embodiment 46. The oligomeric compound of embodiment 43 or embodiment 44, wherein the conjugate linker comprises 1-3 linker nucleosides.

[0240] Embodiment 47. The oligomeric compound of any of embodiments 43-45, wherein the conjugate linker does not comprise any linker nucleosides.

[0241] Embodiment 48. The oligomeric compound of any of embodiments 43-47, wherein the conjugate group is attached to the modified oligonucleotide at the 5′-end of the modified oligonucleotide.

[0242] Embodiment 49. The oligomeric compound of any of embodiments 43-47, wherein the conjugate group is attached to the modified oligonucleotide at the 3′-end of the modified oligonucleotide.

[0243] Embodiment 50. The oligomeric compound of any of embodiments 1-41 or 43-49, wherein the oligomeric compound comprises a terminal group.

[0244] Embodiment 51. The oligomeric compound of embodiment 50, wherein the terminal group is an abasic sugar moiety.

[0245] Embodiment 52. The oligomeric compound of any of embodiments 1-51, wherein the oligomeric compound is an RNase H agent comprising the oligomeric compound.

[0246] Embodiment 53. An oligomeric compound comprising a modified oligonucleotide according to the following chemical notation: ^{m}Cₑₛ^{m}CₑₒGₑₒTₑₒ^{m}CₑₛT_{ds}A_{ds}^{m}C_{ds}A_{ds}G_{ds}G_{ds}A_{ds}T_{ds}T_{ds}T_{ds}Tₑₒ^{m}CₑₒTₑₛAₑₛGₑ (SEQ ID NO: 83), wherein:
[0247] A=an adenine nucleobase,
[0248] ^{m}C=a 5-methylcytosine nucleobase,
[0249] G=a guanine nucleobase,
[0250] T=a thymine nucleobase,
[0251] e=a 2′-O(CH₂)₂OCH₃ ribosyl sugar moiety,
[0252] d=a 2′-β-D-deoxyribosyl sugar moiety,
[0253] s=a phosphorothioate internucleoside linkage, and
[0254] o=a phosphodiester internucleoside linkage.

[0255] Embodiment 54. An oligomeric compound comprising a modified oligonucleotide according to the following chemical notation: TₑₛTₑₒ^{m}Cₑₒ^{m}CₑₒGₑₛT_{ds}^{m}C_{ds}T_{ds}A_{ds}^{m}C_{ds}A_{ds}G_{ds}G_{ds}A_{ds}T_{ds}TₑₒTₑₒTₑₛ^{m}CₑₛTₑ (SEQ ID NO: 1454), wherein:
[0256] A=an adenine nucleobase,
[0257] ^{m}C=a 5-methylcytosine nucleobase,
[0258] G=a guanine nucleobase,
[0259] T=a thymine nucleobase,
[0260] e=a 2′-O(CH₂)₂OCH₃ ribosyl sugar moiety,
[0261] d=a 2′-β-D-deoxyribosyl sugar moiety,
[0262] s=a phosphorothioate internucleoside linkage, and
[0263] o=a phosphodiester internucleoside linkage.

[0264] Embodiment 55. An oligomeric compound comprising a modified oligonucleotide according to the following chemical notation: TₑₛTₑₒ^{m}Cₑₒ^{m}CₑₒGₑₒTₑₒ^{m}C_{ds}T_{ds}A_{ds}^{m}C_{ds}A_{ds}G_{ds}G_{ds}A_{ds}T_{ds}T_{ds}TₑₒTₑₛ^{m}CₑₛTₑ (SEQ ID NO: 1454), wherein:
[0265] A=an adenine nucleobase,
[0266] ^{m}C=a 5-methylcytosine nucleobase,
[0267] G=a guanine nucleobase,
[0268] T=a thymine nucleobase,
[0269] e=a 2′-O(CH₂)₂OCH₃ ribosyl sugar moiety,
[0270] d=a 2′-β-D-deoxyribosyl sugar moiety,
[0271] s=a phosphorothioate internucleoside linkage, and
[0272] o=a phosphodiester internucleoside linkage.

[0273] Embodiment 56. An oligomeric compound comprising a modified oligonucleotide according to the following chemical notation: Gₑₛ^{m}CₑₒAₑₒ^{m}CₑₒAₑₛ^{m}C_{ds}A_{ds}A_{ds}G_{ds}T_{ds}A_{ds}A_{ds}A_{ds}G_{ds}^{m}C_{ds}TₑₒAₑₒGₑₛ^{m}CₑₛAₑ (SEQ ID NO: 921), wherein:
[0274] A=an adenine nucleobase,
[0275] ^{m}C=a 5-methylcytosine nucleobase,
[0276] G=a guanine nucleobase,
[0277] T=a thymine nucleobase,
[0278] e=a 2′-O(CH₂)₂OCH₃ ribosyl sugar moiety,
[0279] d=a 2′-β-D-deoxyribosyl sugar moiety,
[0280] s=a phosphorothioate internucleoside linkage, and
[0281] o=a phosphodiester internucleoside linkage.

[0282] Embodiment 57. The oligomeric compound of any of embodiments 53-56, wherein the modified oligonucleotide is a pharmaceutically acceptable salt.

[0283] Embodiment 58. The oligomeric compound of embodiment 57, wherein the modified oligonucleotide is a pharmaceutically acceptable salt comprising one or more cations selected from sodium, potassium, calcium, and magnesium.

[0284] Embodiment 59. The oligomeric compound of any of embodiments 1-58, wherein the oligomeric compound is a singled-stranded oligomeric compound.

[0285] Embodiment 60. An oligomeric duplex, comprising a first oligomeric compound and a second oligomeric compound comprising a second modified oligonucleotide, wherein the first oligomeric compound is an oligomeric compound of any of embodiments 1-59.

[0286] Embodiment 61. The oligomeric duplex of embodiment 60, wherein the second modified oligonucleotide consists of 12 to 50 linked nucleosides, and wherein the nucleobase sequence of the second modified oligonucleotide comprises a complementary region of at least 8 nucleobases that is at least 90% complementary to an equal length portion of the first modified oligonucleotide.

[0287] Embodiment 62. The oligomeric duplex of embodiment 60 or embodiment 61, wherein the modified oligonucleotide of the first oligomeric compound comprises a 5′-stabilized phosphate group.

[0288] Embodiment 63. The oligomeric duplex of embodiment 62, wherein the stabilized phosphate group comprises a cyclopropyl phosphonate or a vinyl phosphonate.

[0289] Embodiment 64. The oligomeric duplex of any of embodiments 60-63, wherein at least one nucleoside of the second modified oligonucleotide comprises a modified sugar moiety.

[0290] Embodiment 65. The oligomeric duplex of embodiment 64, wherein the modified sugar moiety of the second modified oligonucleotide comprises a bicyclic sugar moiety.

[0291] Embodiment 66. The oligomeric duplex of embodiment 65, wherein the bicyclic sugar moiety of the second modified oligonucleotide comprises a 2′-4′ bridge selected from —O—CH₂—; and —O—CH(CH₃)—.

[0292] Embodiment 67. The oligomeric duplex of embodiment 64, wherein the modified sugar moiety of the second modified oligonucleotide comprises a non-bicyclic modified sugar moiety.

[0293] Embodiment 68. The oligomeric duplex of embodiment 67, wherein the non-bicyclic modified sugar moiety of the second modified oligonucleotide is a 2′-O(CH₂)₂OCH₃ ribosyl sugar moiety, a 2′-F modified sugar moiety, or 2′-OMe modified sugar moiety.

[0294] Embodiment 69. The oligomeric duplex of any one of embodiments 60-68, wherein at least one internucleoside linkage of the second modified oligonucleotide is a modified internucleoside linkage.

[0295] Embodiment 70. The oligomeric duplex of embodiment 69, wherein at least one modified internucleoside linkage of the second modified oligonucleotide is a phosphorothioate internucleoside linkage.

[0296] Embodiment 71. The oligomeric duplex of any of embodiments 60-70, wherein at least one internucleoside linkage of the second modified oligonucleotide is a phosphodiester internucleoside linkage.

[0297] Embodiment 72. The oligomeric duplex of any of embodiments 60-71, wherein each internucleoside linkage of the second modified oligonucleotide is independently selected from a phosphodiester or a phosphorothioate internucleoside linkage.

[0298] Embodiment 73. The oligomeric duplex of any of embodiments 60-72, wherein the second modified oligonucleotide comprises at least one modified nucleobase.

[0299] Embodiment 74. The oligomeric duplex of embodiment 73, wherein the at least one modified nucleobase of the second modified oligonucleotide is 5-methylcytosine.

[0300] Embodiment 75. The oligomeric duplex of any of embodiments 60-74, wherein the second modified oligonucleotide comprises a conjugate group.

[0301] Embodiment 76. The oligomeric duplex of embodiment 75, wherein the conjugate group comprises a conjugate linker and a conjugate moiety.

[0302] Embodiment 77. The oligomeric duplex of embodiment 75 or embodiment 76, wherein the conjugate group is attached to the 5′-end of the second modified oligonucleotide.

[0303] Embodiment 78. The oligomeric duplex of embodiment 75 or embodiment 76, wherein the conjugate group is attached to the 3′-end of the second modified oligonucleotide.

[0304] Embodiment 79. The oligomeric duplex of any of embodiments 75-78, wherein the conjugate group comprises a lipid.

[0305] Embodiment 80. The oligomeric duplex of any of embodiments 60-79, wherein the second modified oligonucleotide comprises a terminal group.

[0306] Embodiment 81. The oligomeric duplex of embodiment 80, wherein the terminal group is an abasic sugar moiety.

[0307] Embodiment 82. The oligomeric duplex of any of embodiments 60-81, wherein the second modified oligonucleotide consists of 12 to 20, 12 to 25, 12 to 30, 12 to 50, 13 to 20, 13 to 25, 13 to 30, 13 to 50, 14 to 20, 14 to 25, 14 to 30, 14 to 50, 15 to 20, 15 to 25, 15 to 30, 15 to 50, 16 to 18, 16 to 20, 16 to 25, 16 to 30, 16 to 50, 17 to 20, 17 to 25, 17 to 30, 17 to 50, 18 to 20, 18 to 22, 18 to 25, 18 to 30, 18 to 50, 19 to 20, 19 to 25, 19 to 30, 19 to 50, 20 to 25, 20 to 30, 20 to 50, 21 to 25, 21 to 30, 21 to 50, 22 to 25, 22 to 30, 22 to 50, 23 to 25, 23 to 30, or 23 to 50 linked nucleosides.

[0308] Embodiment 83. An antisense agent comprising an antisense compound, wherein the antisense compound is an oligomeric compound of any of embodiments 1-59.

[0309] Embodiment 84. An antisense agent comprising an antisense compound, wherein the antisense compound is an oligomeric duplex of any of embodiments 60-82.

[0310] Embodiment 85. The antisense agent of embodiment 83 or embodiment 84, wherein the antisense agent comprises a conjugate group, wherein the conjugate group comprises a cell-targeting moiety.

[0311] Embodiment 86. A modified oligonucleotide according to the following chemical structure:

[chemical structure]

or a pharmaceutically acceptable salt thereof.

[0312] Embodiment 87. A modified oligonucleotide according to the following chemical structure:

[chemical structure]

or a pharmaceutically acceptable salt thereof.

[0313] Embodiment 88. A modified oligonucleotide according to the following chemical structure:

[chemical structure]

or a pharmaceutically acceptable salt thereof.

[0314] Embodiment 89. A modified oligonucleotide according to the following chemical structure:

[chemical structure]

or a pharmaceutically acceptable salt thereof.

[0315] Embodiment 90. The modified oligonucleotide of any one of embodiments 86-89, which is a pharmaceutically acceptable salt comprising one or more cations selected from sodium, potassium, calcium, and magnesium.

[0316] Embodiment 91. A modified oligonucleotide according to the following chemical structure:

[chemical structure]

[0317] Embodiment 92. A modified oligonucleotide according to the following chemical structure:

[chemical structure]

[0318] Embodiment 93. A modified oligonucleotide according to the following chemical structure:

[chemical structure]

[0319] Embodiment 94. A modified oligonucleotide according to the following chemical structure:

[chemical structure]

[0320] Embodiment 95. A chirally enriched population of oligomeric compounds of any of embodiments 1-59 or modified oligonucleotides of any of embodiments 86-94, wherein the population is enriched for modified oligonucleotides comprising at least one particular phosphorothioate internucleoside linkage having a particular stereochemical configuration.

[0321] Embodiment 96. The chirally enriched population of embodiment 95, wherein the population is enriched for modified oligonucleotides comprising at least one particular phosphorothioate internucleoside linkage having the (Sp) configuration.

[0322] Embodiment 97. The chirally enriched population of embodiment 95, wherein the population is enriched for modified oligonucleotides comprising at least one particular phosphorothioate internucleoside linkage having the (Rp) configuration.

[0323] Embodiment 98. The chirally enriched population of embodiment 95, wherein the population is enriched for modified oligonucleotides having a particular, independently selected stereochemical configuration at each phosphorothioate internucleoside linkage.

[0324] Embodiment 99. The chirally enriched population of embodiment 95, wherein the population is enriched for modified oligonucleotides having the (Sp) configuration at each phosphorothioate internucleoside linkage or for modified oligonucleotides having the (Rp) configuration at each phosphorothioate internucleoside linkage.

[0325] Embodiment 100. The chirally enriched population of embodiment 95, wherein the population is enriched for modified oligonucleotides having the (Rp) configuration at one particular phosphorothioate internucleoside linkage and the (Sp) configuration at each of the remaining phosphorothioate internucleoside linkages.

[0326] Embodiment 101. The chirally enriched population of embodiment 95, wherein the population is enriched for modified oligonucleotides having at least 3 contiguous phosphorothioate internucleoside linkages in the Sp, Sp, and Rp configurations, in the 5′ to 3′ direction.

[0327] Embodiment 102. A population of oligomeric compounds of any of embodiments 1-59 or modified oligonucleotides of any of embodiments 86-94, wherein all of the phosphorothioate internucleoside linkages of the modified oligonucleotide are stereorandom.

[0328] Embodiment 103. A pharmaceutical composition comprising an oligomeric compound of any of embodiments 1-59, a modified oligonucleotide of any of embodiments 86-94, an oligomeric duplex of any of embodiments 60-82, an antisense agent of any of embodiments 83-85, or a population of any of embodiments 95-102, and a pharmaceutically acceptable diluent.

[0329] Embodiment 104. The pharmaceutical composition of embodiment 103, wherein the pharmaceutically acceptable diluent is artificial cerebrospinal fluid (aCSF) or phosphate-buffered saline (PBS).

[0330] Embodiment 105. The pharmaceutical composition of embodiment 104, wherein the pharmaceutical composition consists essentially of the oligomeric compound of any of embodiments 1-59, the modified oligonucleotide of any of embodiments 86-94, the oligomeric duplex of any of embodiments 60-82, the antisense agent of any of embodiments 83-85, or the population of any of embodiments 95-102, and aCSF.

[0331] Embodiment 106. The pharmaceutical composition of embodiment 104, wherein the pharmaceutical composition consists essentially of the oligomeric compound of any of embodiments 1-59, the modified oligonucleotide of any of embodiments 86-94, the oligomeric duplex of any of embodiments 60-82, the antisense agent of any of embodiments 83-85, or the population of any of embodiments 95-102, and PBS.

[0332] Embodiment 107. A method comprising administering to a subject an oligomeric compound of any of embodiments 1-59, a modified oligonucleotide of any of embodiments 86-94, an oligomeric duplex of any of embodiments 60-82, an antisense agent of any of embodiments 83-85, a population of any of embodiments 95-102, or a pharmaceutical composition of any of embodiments 103-106.

[0333] Embodiment 108. A method of treating a glycogen storage disease comprising administering to a subject having or at risk of developing a glycogen storage disease a therapeutically effective amount of an oligomeric compound of any of embodiments 1-59, a modified oligonucleotide of any of embodiments 86-94, an oligomeric duplex of any of embodiments 60-82, an antisense agent of any of embodiments 83-85, a population of any of embodiments 95-102, or a pharmaceutical composition of any of embodiments 103-106.

[0334] Embodiment 109. The method of embodiment 108, wherein the glycogen storage disease is Lafora disease, adult polyglucosan body disease (APBD), Andersen's disease, or Pompe disease.

[0335] Embodiment 110. The method of embodiment 108, wherein the glycogen storage disease is Lafora disease.

[0336] Embodiment 111. The method of any of embodiments 108-110, wherein at least one symptom or hallmark of the glycogen storage disease is ameliorated.

[0337] Embodiment 112. The method of embodiment 111, wherein the at least one symptom or hallmark is seizures, cognitive deterioration, neuromuscular weakness, myoclonus, dementia, ataxia, cerebellar dysfunction, impaired speech, loss of ambulation, swallowing difficulty, or epileptic episode.

[0338] Embodiment 113. The method of embodiment 111 or embodiment 112, wherein administering the oligomeric compound of any of embodiments 1-59, the modified oligonucleotide of any of embodiments 86-94, the oligomeric duplex of any of embodiments 60-82, the antisense agent of any of embodiments 83-85, the population of any of embodiments 95-102, or the pharmaceutical composition of any of embodiments 103-106 reduces or delays the onset or progression of seizures, neuromuscular weakness, myoclonus, dementia, ataxia, cerebellar dysfunction, impaired speech, loss of ambulation, swallowing difficulty, or epileptic episode, or slows cognitive deterioration in the subject.

[0339] Embodiment 114. The method of any of embodiments 107-113, wherein the oligomeric compound of any of embodiments 1-59, the modified oligonucleotide of any of embodiments 86-94, the oligomeric duplex of any of embodiments 60-82, the antisense agent of any of embodiments 83-85, the population of any of embodiments 95-102, or the pharmaceutical composition of any of embodiments 103-106 is administered to the central nervous system or systemically.

[0340] Embodiment 115. The method of any of embodiments 107-114, wherein the oligomeric compound of any of embodiments 1-59, the modified oligonucleotide of any of embodiments 86-94, the oligomeric duplex of any of embodiments 60-82, the antisense agent of any of embodiments 83-85, the population of any of embodiments 95-102, or the pharmaceutical composition of any of embodiments 103-106 is administered intrathecally.

[0341] Embodiment 116. The method of any of embodiments 107-115, wherein the subject is a human.

[0342] Embodiment 117. A method of reducing expression of GYS1 in a cell comprising contacting the cell with an oligomeric compound of any of embodiments 1-59, a modified oligonucleotide of any of embodiments 86-94, an oligomeric duplex of any of embodiments 60-82, an antisense agent of any of embodiments 83-85, a population of any of embodiments 95-102, or a pharmaceutical composition of any of embodiments 103-106.

[0343] Embodiment 118. The method of embodiment 117, wherein the cell is a neuron.

[0344] Embodiment 119. The method of embodiment 117 or embodiment 118, wherein the cell is a human cell.

[0345] Embodiment 120. Use of an oligomeric compound of any of embodiments 1-59, a modified oligonucleotide of any of embodiments 86-94, an oligomeric duplex of any of embodiments 60-82, an antisense agent of any of embodiments 83-85, a population of any of embodiments 95-102, or a pharmaceutical composition of any of embodiments 103-106 for treating a glycogen storage disease.

[0346] Embodiment 121. Use of an oligomeric compound of any of embodiments 1-59, a modified oligonucleotide of any of embodiments 86-94, an oligomeric duplex of any of embodiments 60-82, an antisense agent of any of embodiments 83-85, a population of any of embodiments 95-102, or a pharmaceutical composition of any of embodiments 103-106 in the manufacture of a medicament for treating a glycogen storage disease.

[0347] Embodiment 122. The use of embodiment 120 or embodiment 121, wherein the glycogen storage disease is Lafora disease, adult polyglucosan body disease (APBD), Andersen's disease, or Pompe disease.

[0348] Embodiment 123. The use of embodiment 120 or embodiment 121, wherein the glycogen storage disease is Lafora disease.

[0349] Embodiment 124. The method of embodiment 107, wherein the subject has a glycogen storage disease.

[0350] Embodiment 125. The method of embodiment 107, wherein the subject has Lafora disease.

### I. Certain Oligonucleotides

[0351] In certain embodiments, provided herein are oligomeric compounds comprising oligonucleotides, which consist of linked nucleosides. Oligonucleotides may be unmodified oligonucleotides (RNA or DNA) or may be modified oligonucleotides. Modified oligonucleotides comprise at least one modification relative to unmodified RNA or DNA. That is, modified oligonucleotides comprise at least one modified nucleoside (comprising a modified sugar moiety and/or a modified nucleobase) and/or at least one modified internucleoside linkage. Certain modified nucleosides and modified internucleoside linkages suitable for use in modified oligonucleotides are described below.

### A. Certain Modified Nucleosides

[0352] Modified nucleosides comprise a modified sugar moiety or a modified nucleobase or both a modifed sugar moiety and a modified nucleobase. In certain embodiments, modified nucleosides comprising the following modified sugar moieties and/or the following modified nucleobases may be incorporated into modified oligonucleotides.

### 1. Certain Sugar Moieties

[0353] In certain embodiments, modified sugar moieties are non-bicyclic modified sugar moieties. In certain embodiments, modified sugar moieties are bicyclic or tricyclic sugar moieties. In certain embodiments, modified sugar moieties are sugar surrogates. Such sugar surrogates may comprise one or more substitutions corresponding to those of other types of modified sugar moieties.

[0354] In certain embodiments, modified sugar moieties are non-bicyclic modified furanosyl sugar moieties comprising one or more acyclic substituent, including, but not limited, to substituents at the 2′, 3′, 4′, and/or 5′ positions. In certain embodiments, the furanosyl sugar moiety is a ribosyl sugar moiety. In certain embodiments, one or more acyclic substituent of non-bicyclic modified sugar moieties is branched.

[0355] In certain embodiments, non-bicyclic modifed sugar moieties comprise a substituent group at the 2′-position. Examples of substituent groups suitable for the 2′-position of modified sugar moieties include but are not limited to: —F, —OCH₃ (“OMe” or “O-methyl”), and —O(CH₂)₂OCH₃ (“MOE”). In certain embodiments, 2′-substituent groups are selected from among: halo, allyl, amino, azido, SH, CN, OCN, CF₃, OCF₃, O—C₁-C₁₀ alkoxy, O—C₁-C₁₀ substituted alkoxy, O—C₁-C₁₀ alkyl, O—C₁-C₁₀ substituted alkyl, S-alkyl, N(Rₘ)-alkyl, O-alkenyl, S-alkenyl, N(Rₘ)-alkenyl, O-alkynyl, S-alkynyl, N(Rₘ)-alkynyl, O-alkylenyl-O-alkyl, alkynyl, alkaryl, aralkyl, O-alkaryl, O-aralkyl, O(CH₂)₂SCH₃, O(CH₂)₂ON(Rₘ)(Rₙ) or OCH₂C(═O)—N(Rₘ)(Rₙ), where each Rₘ and Rₙ is, independently, H, an amino protecting group, or substituted or unsubstituted C₁-C₁₀ alkyl, —O(CH₂)₂ON(CH₃)₂ (“DMAOE”), 2′-O(CH₂)₂O(CH₂)₂N(CH₃)₂ (“DMAEOE”), and the 2′-substituent groups described in Cook et al., U.S. Pat. No. 6,531,584; Cook et al., U.S. Pat. No. 5,859,221; and Cook et al., U.S. Pat. No. 6,005,087. Certain embodiments of these 2′-substituent groups can be further substituted with one or more substituent groups independently selected from among: hydroxyl, amino, alkoxy, carboxy, benzyl, phenyl, nitro (NO₂), thiol, thioalkoxy, thioalkyl, halogen, alkyl, aryl, alkenyl and alkynyl.

[0356] In certain embodiments, a 2′-substituted non-bicyclic modified nucleoside comprises a sugar moiety comprising a non-bridging 2′-substituent group selected from: F, NH₂, N₃, OCF₃, OCH₃, O(CH₂)₃NH₂, CH₂CH═CH₂, OCH₂CH═CH₂, OCH₂CH₂OCH₃, O(CH₂)₂SCH₃, O(CH₂)₂ON(Rₘ)(Rₙ), O(CH₂)₂O(CH₂)₂N(CH₃)₂, and N-substituted acetamide (OCH₂C(═O)—N(Rₘ)(Rₙ)), where each Rₘ and Rₙ is, independently, H, an amino protecting group, or substituted or unsubstituted C₁-C₁₀ alkyl.

[0357] In certain embodiments, a 2′-substituted non-bicyclic modified nucleoside comprises a sugar moiety comprising a non-bridging 2′-substituent group selected from: F, OCF₃, OCH₃, OCH₂CH₂OCH₃, O(CH₂)₂SCH₃, O(CH₂)₂ON(CH₃)₂, O(CH₂)₂O(CH₂)₂N(CH₃)₂, and OCH₂C(═O)—N(H)CH₃ (“NMA”).

[0358] In certain embodiments, a 2′-substituted non-bicyclic modified nucleoside comprises a sugar moiety comprising a non-bridging 2′-substituent group selected from: F, OCH₃, and OCH₂CH₂OCH₃.

[0359] In certain embodiments, modified furanosyl sugar moieties and nucleosides incorporating such modified furanosyl sugar moieties are further defined by isomeric configuration. For example, a 2′-deoxyfuranosyl sugar moiety may be in seven isomeric configurations other than the naturally occurring β-D-deoxyribosyl configuration. Such modified sugar moieties are described in, e.g., WO 2019/157531, incorporated by reference herein. A 2′-modified sugar moiety has an additional stereocenter at the 2′-position relative to a 2′-deoxyfuranosyl sugar moiety; therefore, such sugar moieties have a total of sixteen possible isomeric configurations. 2′-modified sugar moieties described herein are in the β-D-ribosyl isomeric configuration unless otherwise specified.

[0360] In certain embodiments, non-bicyclic modifed sugar moieties comprise a substituent group at the 4′-position. Examples of substituent groups suitable for the 4′-position of modified sugar moieties include but are not limited to alkoxy (e.g., methoxy), alkyl, and those described in Manoharan et al., WO 2015/106128.

[0361] In certain embodiments, non-bicyclic modifed sugar moieties comprise a substituent group at the 3′-position. Examples of substituent groups suitable for the 3′-position of modified sugar moieties include but are not limited to alkoxy (e.g., methoxy), alkyl (e.g., methyl, ethyl).

[0362] In certain embodiments, non-bicyclic modifed sugar moieties comprise a substituent group at the 5′-position. Examples of substituent groups suitable for the 5′-position of modified sugar moieties include but are not limited to vinyl, alkoxy (e.g., methoxy), alkyl (e.g., methyl (R or S), ethyl).

[0363] In certain embodiments, non-bicyclic modified sugar moieties comprise more than one non-bridging sugar substituent, for example, 2′-F-5′-methyl sugar moieties and the modified sugar moieties and modified nucleosides described in Migawa et al., WO 2008/101157 and Rajeev et al., US2013/0203836).

[0364] In naturally occurring nucleic acids, sugars are linked to one another 3′ to 5′. In certain embodiments, oligonucleotides include one or more nucleoside or sugar moiety linked at an alternative position, for example at the 2′ position or inverted 5′ to 3′. For example, where the linkage is at the 2′ position, the 2′-substituent groups may instead be at the 3′-position.

[0365] Certain modifed sugar moieties comprise a substituent that bridges two atoms of the furanosyl ring to form a second ring, resulting in a bicyclic sugar moiety. In certain such embodiments, the bicyclic sugar moiety comprises a bridge between the 4′ and the 2′ furanose ring atoms. Examples of such 4′ to 2′ bridging sugar substituents include but are not limited to: 4′-CH₂-2′, 4′-(CH₂)₂-2′, 4′-(CH₂)₃-2′, 4′-CH₂—O-2′ (“LNA”), 4′-CH₂—S-2′, 4′-(CH₂)₂—O-2′ (“ENA”), 4′-CH(CH₃)—O-2′ (referred to as “constrained ethyl” or “cEt”), 4′-CH₂—O—CH₂-2′, 4′-CH₂—N(R)-2′, 4′-CH(CH₂OCH₃)—O-2′ (“constrained MOE” or “cMOE”) and analogs thereof (see, e.g., Seth et al., U.S. Pat. No. 7,399,845, Bhat et al., U.S. Pat. No. 7,569,686, Swayze et al., U.S. Pat. No. 7,741,457, and Swayze et al., U.S. Pat. No. 8,022,193), 4′-C(CH₃)(CH₃)—O-2′ and analogs thereof (see, e.g., Seth et al., U.S. Pat. No. 8,278,283), 4′-CH₂—N(OCH₃)-2′ and analogs thereof (see, e.g., Prakash et al., U.S. Pat. No. 8,278,425), 4′-CH₂—O—N(CH₃)-2′ (see, e.g., Allerson et al., U.S. Pat. No. 7,696,345 and Allerson et al., U.S. Pat. No. 8,124,745), 4′-CH₂—C(H)(CH₃)-2′ (see, e.g., Zhou, et al., J. Org. Chem., 2009, 74, 118-134), 4′-CH₂—C(═CH₂)-2′ and analogs thereof (see e.g., Seth et al., U.S. Pat. No. 8,278,426), 4′-C(RₐR_{b})—N(R)—O-2′, 4′-C(RₐR_{b})—O—N(R)-2′, 4′-CH₂—O—N(R)-2′, and 4′-CH₂—N(R)—O-2′, wherein each R, Rₐ, and R_{b} is, independently, H, a protecting group, or C₁-C₁₂ alkyl (see, e.g. Imanishi et al., U.S. Pat. No. 7,427,672).

[0366] In certain embodiments, such 4′ to 2′ bridges independently comprise from 1 to 4 linked groups independently selected from: —[C(Rₐ)(R_{b})]ₙ—, —[C(Rₐ)(R_{b})]—O—, —C(Rₐ)═C(R_{b})—, —C(Rₐ)═N—, —C(═NRₐ)—, —C(═O)—, —C(═S)—, —O—, —Si(Rₐ)₂—, —S(═O)ₓ—, and —N(Rₐ)—;
[0367] wherein:
[0368] x is 0, 1, or 2;
[0369] n is 1, 2, 3, or 4;
[0370] each Rₐ and R_{b} is, independently, H, a protecting group, hydroxyl, C₁-C₁₂ alkyl, substituted C₁-C₁₂ alkyl, C₂-C₁₂ alkenyl, substituted C₂-C₁₂ alkenyl, C₂-C₁₂ alkynyl, substituted C₂-C₁₂ alkynyl, C₅-C₂₀ aryl, substituted C₅-C₂₀ aryl, heterocycle radical, substituted heterocycle radical, heteroaryl, substituted heteroaryl, C₅-C₇ alicyclic radical, substituted C₅-C₇ alicyclic radical, halogen, OJ₁, NJ₁J₂, SJ₁, N₃, COOJ₁, acyl (C(═O)—H), substituted acyl, CN, sulfonyl (S(═O)₂-J₁), or sulfoxyl (S(═O)-J₁); and
[0371] each J₁ and J₂ is, independently, H, C₁-C₁₂ alkyl, substituted C₁-C₁₂ alkyl, C₂-C₁₂ alkenyl, substituted C₂-C₁₂ alkenyl, C₂-C₁₂ alkynyl, substituted C₂-C₁₂ alkynyl, C₅-C₂₀ aryl, substituted C₅-C₂₀ aryl, acyl (C(═O)—H), substituted acyl, a heterocycle radical, a substituted heterocycle radical, C₁-C₁₂ aminoalkyl, substituted C₁-C₁₂ aminoalkyl, or a protecting group.

[0372] Additional bicyclic sugar moieties are known in the art, see, for example: Freier et al., Nucleic Acids Research, 1997, 25(22), 4429-4443, Albaek et al., J. Org. Chem., 2006, 71, 7731-7740, Singh et al., Chem. Commun., 1998, 4, 455-456; Koshkin et al., Tetrahedron, 1998, 54, 3607-3630; Kumar et al., Bioorg. Med. Chem. Lett., 1998, 8, 2219-2222; Singh et al., J. Org. Chem., 1998, 63, 10035-10039; Srivastava et al., J. Am. Chem. Soc., 2007, 129, 8362-8379; Wengel et al., U.S. Pat. No. 7,053,207; Imanishi et al., U.S. Pat. No. 6,268,490; Imanishi et al. U.S. Pat. No. 6,770,748; Imanishi et al., U.S. RE44,779; Wengel et al., U.S. Pat. No. 6,794,499; Wengel et al., U.S. Pat. No. 6,670,461; Wengel et al., U.S. Pat. No. 7,034,133; Wengel et al., U.S. Pat. No. 8,080,644; Wengel et al., U.S. Pat. No. 8,034,909; Wengel et al., U.S. Pat. No. 8,153,365; Wengel et al., U.S. Pat. No. 7,572,582; Ramasamy et al., U.S. Pat. No. 6,525,191; Torsten et al., WO 2004/106356; Wengel et al., WO 1999/014226; Seth et al., WO 2007/134181; Seth et al., U.S. Pat. No. 7,547,684; Seth et al., U.S. Pat. No. 7,666,854; Seth et al., U.S. Pat. No. 8,088,746; Seth et al., U.S. Pat. No. 7,750,131; Seth et al., U.S. Pat. No. 8,030,467; Seth et al., U.S. Pat. No. 8,268,980; Seth et al., U.S. Pat. No. 8,546,556; Seth et al., U.S. Pat. No. 8,530,640; Migawa et al., U.S. Pat. No. 9,012,421; Seth et al., U.S. Pat. No. 8,501,805; and U.S. Patent Publication Nos. Allerson et al., US2008/0039618 and Migawa et al., US2015/0191727.

[0373] In certain embodiments, bicyclic sugar moieties and nucleosides incorporating such bicyclic sugar moieties are further defined by isomeric configuration. For example, an LNA nucleoside (described herein) may be in the α-L configuration or in the β-D configuration.

[chemical structure]

[0374] α-L-methyleneoxy (4′-CH₂—O-2′) or α-L-LNA bicyclic nucleosides have been incorporated into oligonucleotides that showed antisense activity (Frieden et al., Nucleic Acids Research, 2003, 21, 6365-6372). The addition of locked nucleic acids to siRNAs has been shown to increase siRNA stability in serum, and to reduce off-target effects (Elmen, J. et al., (2005) Nucleic Acids Research 33(1):439-447; Mook, OR. et al., (2007) Mal Cane Ther 6(3):833-843; Grunweller, A. et al., (2003) Nucleic Acids Research 31(12):3185-3193). Herein, general descriptions of bicyclic nucleosides include both isomeric configurations. When the positions of specific bicyclic nucleosides (e.g., LNA or cEt) are identified in exemplified embodiments herein, they are in the β-D configuration, unless otherwise specified.

[0375] In certain embodiments, modified sugar moieties comprise one or more non-bridging sugar substituent and one or more bridging sugar substituent (e.g., 5′-substituted and 4′-2′ bridged sugars).

[0376] In certain embodiments, modified sugar moieties are sugar surrogates. In certain such embodiments, the oxygen atom of the sugar moiety is replaced, e.g., with a sulfur, carbon or nitrogen atom. In certain such embodiments, such modified sugar moieties also comprise bridging and/or non-bridging substituents as described herein. For example, certain sugar surrogates comprise a 4′-sulfur atom and a substitution at the 2′-position (see, e.g., Bhat et al., U.S. Pat. No. 7,875,733 and Bhat et al., U.S. Pat. No. 7,939,677) and/or the 5′ position.

[0377] In certain embodiments, sugar surrogates comprise rings having other than 5 atoms. For example, in certain embodiments, a sugar surrogate comprises a six-membered tetrahydropyran (“THP”). Such tetrahydropyrans may be further modified or substituted. Nucleosides comprising such modified tetrahydropyrans include but are not limited to hexitol nucleic acid (“HNA”), anitol nucleic acid (“ANA”), manitol nucleic acid (“MNA”) (see, e.g., Leumann, C J. Bioorg. & Med. Chem. 2002, 10, 841-854), fluoro HNA:

[chemical structure]

(“F-HNA”, see e.g. Swayze et al., U.S. Pat. No. 8,088,904; Swayze et al., U.S. Pat. No. 8,440,803; Swayze et al., U.S. Pat. No. 8,796,437; and Swayze et al., U.S. Pat. No. 9,005,906; F-HNA can also be referred to as a F-THP or 3′-fluoro tetrahydropyran), and nucleosides comprising additional modified THP compounds having the formula:

[chemical structure]

wherein, independently, for each of the modified THP nucleosides:
[0378] Bx is a nucleobase moiety;
[0379] T₃ and T₄ are each, independently, an internucleoside linking group linking the modified THP nucleoside to the remainder of an oligonucleotide or one of T₃ and T₄ is an internucleoside linking group linking the modified THP nucleoside to the remainder of an oligonucleotide and the other of T₃ and T₄ is H, a hydroxyl protecting group, a linked conjugate group, or a 5′ or 3′-terminal group;
[0380] q₁, q₂, q₃, q₄, q₅, q₆ and q₇ are each, independently, H, C₁-C₆ alkyl, substituted C₁-C₆ alkyl, C₂-C₆ alkenyl, substituted C₂-C₆ alkenyl, C₂-C₆ alkynyl, or substituted C₂-C₆ alkynyl; and
[0381] each of R₁ and R₂ is independently selected from among: hydrogen, halogen, substituted or unsubstituted alkoxy, NJ₁J₂, SJ₁, N₃, OC(═X)J₁, OC(═X)NJ₁J₂, NJ₃C(═X)NJ₁J₂, and CN, wherein X is O, S or NJ₁, and each J₁, J₂, and J₃ is, independently, H or C₁-C₆ alkyl.

[0382] In certain embodiments, modified THP nucleosides are provided wherein q₁, q₂, q₃, q₄, q₅, q₆ and q₇ are each H. In certain embodiments, at least one of q₁, q₂, q₃, q₄, q₅, q₆ and q₇ is other than H. In certain embodiments, at least one of q₁, q₂, q₃, q₄, q₅, q₆ and q₇ is methyl. In certain embodiments, modified THP nucleosides are provided wherein one of R₁ and R₂ is F. In certain embodiments, R₁ is F and R₂ is H, in certain embodiments, R₁ is methoxy and R₂ is H, and in certain embodiments, R₁ is methoxyethoxy and R₂ is H.

[0383] In certain embodiments, sugar surrogates comprise rings having more than 5 atoms and more than one heteroatom. For example, nucleosides comprising morpholino sugar moieties and their use in oligonucleotides have been reported (see, e.g., Braasch et al., Biochemistry, 2002, 41, 4503-4510 and Summerton et al., U.S. Pat. No. 5,698,685; Summerton et al., U.S. Pat. No. 5,166,315; Summerton et al., U.S. Pat. No. 5,185,444; and Summerton et al., U.S. Pat. No. 5,034,506). As used here, the term “morpholino” means a sugar surrogate having the following structure:

[chemical structure]

In certain embodiments, morpholinos may be modified, for example by adding or altering various substituent groups from the above morpholino structure. Such sugar surrogates are referred to herein as “modifed morpholinos.”

[0384] In certain embodiments, sugar surrogates comprise acyclic moieites. Examples of nucleosides and oligonucleotides comprising such acyclic sugar surrogates include but are not limited to: peptide nucleic acid (“PNA”), acyclic butyl nucleic acid (see, e.g., Kumar et al., Org. Biomol. Chem., 2013, 11, 5853-5865), and nucleosides and oligonucleotides described in Manoharan et al., WO2011/133876. In certain embodiments, sugar surrogates comprise acyclic moieties. Examples of nucleosides and oligonucleotides comprising such acyclic sugar surrogates include, but are not limited to: peptide nucleic acid (“PNA”), acyclic butyl nucleic acid (see, e.g., Kumar et al., Org. Biomol. Chem., 2013, 11, 5853-5865), and nucleosides and oligonucleotides described in Manoharan et al., US2013/130378. Representative U.S. patents that teach the preparation of PNA compounds include, but are not limited to, U.S. Pat. Nos. 5,539,082; 5,714,331; and 5,719,262. Additional PNA compounds suitable for use in the oligonucleotides of the invention are described in, for example, in Nielsen et al., Science, 1991, 254, 1497-1500.

[0385] In certain embodiments, sugar surrogates are the “unlocked” sugar structure of UNA (unlocked nucleic acid) nucleosides. UNA is an unlocked acyclic nucleic acid, wherein any of the bonds of the sugar has been removed, forming an unlocked sugar surrogate. Representative U.S. publications that teach the preparation of UNA include, but are not limited to, U.S. Pat. No. 8,314,227; and US Patent Publication Nos. 2013/0096289; 2013/0011922; and 2011/0313020, the entire contents of each of which are hereby incorporated herein by reference.

[0386] In certain embodiments, sugar surrogates are the glycerol as found in GNA (glycol nucleic acid) nucleosides as depicted below:

[chemical structure]

where Bx represents any nucleobase.

[0387] Many other bicyclic and tricyclic sugar and sugar surrogate ring systems are known in the art that can be used in modified nucleosides.

### 2. Certain Modified Nucleobases

[0388] In certain embodiments, modified oligonucleotides comprise one or more nucleosides comprising an unmodified nucleobase. In certain embodiments, modified oligonucleotides comprise one or more nucleoside comprising a modified nucleobase. In certain embodiments, modified oligonucleotides comprise one or more nucleoside that does not comprise a nucleobase, referred to as an abasic nucleoside. In certain embodiments, modified oligonucleotides comprise one or more inosine nucleosides (i.e., nucleosides comprising a hypoxanthine nucleobase).

[0389] In certain embodiments, modified nucleobases are selected from: 5-substituted pyrimidines, 6-azapyrimidines, alkyl or alkynyl substituted pyrimidines, alkyl substituted purines, and N-2, N-6 and 0-6 substituted purines. In certain embodiments, modified nucleobases are selected from: 2-aminopropyladenine, 5-hydroxymethyl cytosine, xanthine, hypoxanthine, 2-aminoadenine, 6-N-methylguanine, 6-N-methyladenine, 2-propyladenine, 2-thiouracil, 2-thiothymine and 2-thiocytosine, 5-propynyl (—C≡C—CH₃) uracil, 5-propynylcytosine, 6-azouracil, 6-azocytosine, 6-azothymine, 5-ribosyluracil (pseudouracil), 4-thiouracil, 8-halo, 8-amino, 8-thiol, 8-thioalkyl, 8-hydroxyl, 8-aza and other 8-substituted purines, 5-halo, particularly 5-bromo, 5-trifluoromethyl, 5-halouracil, and 5-halocytosine, 7-methylguanine, 7-methyladenine, 2-F-adenine, 2-aminoadenine, 7-deazaguanine, 7-deazaadenine, 3-deazaguanine, 3-deazaadenine, 6-N-benzoyladenine, 2-N-isobutyrylguanine, 4-N-benzoylcytosine, 4-N-benzoyluracil, 5-methyl 4-N-benzoylcytosine, 5-methyl 4-N-benzoyluracil, universal bases, hydrophobic bases, promiscuous bases, size-expanded bases, and fluorinated bases. Further modified nucleobases include tricyclic pyrimidines, such as 1,3-diazaphenoxazine-2-one, 1,3-diazaphenothiazine-2-one and 9-(2-aminoethoxy)-1,3-diazaphenoxazine-2-one (G-clamp). Modified nucleobases may also include those in which the purine or pyrimidine base is replaced with other heterocycles, for example 7-deaza-adenine, 7-deazaguanosine, 2-aminopyridine and 2-pyridone. Further nucleobases include those disclosed in Merigan et al., U.S. Pat. No. 3,687,808, those disclosed in The Concise Encyclopedia Of Polymer Science And Engineering, Kroschwitz, J. I., Ed., John Wiley & Sons, 1990, 858-859; Englisch et al., Angewandte Chemie, International Edition, 1991, 30, 613; Sanghvi, Y. S., Chapter 15, Antisense Research and Applications, Crooke, S. T. and Lebleu, B., Eds., CRC Press, 1993, 273-288; and those disclosed in Chapters 6 and 15, Antisense Drug Technology, Crooke S. T., Ed., CRC Press, 2008, 163-166 and 442-443.

[0390] Publications that teach the preparation of certain of the above noted modified nucleobases as well as other modified nucleobases include without limitation, Manoharan et al., US2003/0158403; Manoharan et al., US2003/0175906; Dinh et al., U.S. Pat. No. 4,845,205; Spielvogel et al., U.S. Pat. No. 5,130,302; Rogers et al., U.S. Pat. No. 5,134,066; Bischofberger et al., U.S. Pat. No. 5,175,273; Urdea et al., U.S. Pat. No. 5,367,066; Benner et al., U.S. Pat. No. 5,432,272; Matteucci et al., U.S. Pat. No. 5,434,257; Gmeiner et al., U.S. Pat. No. 5,457,187; Cook et al., U.S. Pat. No. 5,459,255; Froehler et al., U.S. Pat. No. 5,484,908; Matteucci et al., U.S. Pat. No. 5,502,177; Hawkins et al., U.S. Pat. No. 5,525,711; Haralambidis et al., U.S. Pat. No. 5,552,540; Cook et al., U.S. Pat. No. 5,587,469; Froehler et al., U.S. Pat. No. 5,594,121; Switzer et al., U.S. Pat. No. 5,596,091; Cook et al., U.S. Pat. No. 5,614,617; Froehler et al., U.S. Pat. No. 5,645,985; Cook et al., U.S. Pat. No. 5,681,941; Cook et al., U.S. Pat. No. 5,811,534; Cook et al., U.S. Pat. No. 5,750,692; Cook et al., U.S. Pat. No. 5,948,903; Cook et al., U.S. Pat. No. 5,587,470; Cook et al., U.S. Pat. No. 5,457,191; Matteucci et al., U.S. Pat. No. 5,763,588; Froehler et al., U.S. Pat. No. 5,830,653; Cook et al., U.S. Pat. No. 5,808,027; Cook et al., 6,166,199; and Matteucci et al., U.S. Pat. No. 6,005,096.

### 3. Certain Modified Internucleoside Linkages

[0391] The naturally occurring internucleoside linkage of RNA and DNA is a 3′ to 5′ phosphodiester linkage. In certain embodiments, nucleosides of modified oligonucleotides may be linked together using one or more modified internucleoside linkages. The two main classes of internucleoside linking groups are defined by the presence or absence of a phosphorus atom. Representative phosphorus-containing internucleoside linkages include but are not limited to phosphodiesters, which contain a phosphodiester bond (“P(O₂)═O”) (also referred to as unmodified or naturally occurring linkages), phosphotriesters, methylphosphonates, phosphoramidates, phosphorothioates (“P(O₂)═S”), and phosphorodithioates (“HS—P═S”). Representative non-phosphorus containing internucleoside linking groups include but are not limited to methylenemethylimino (—CH₂—N(CH₃)—O—CH₂—), thiodiester, thionocarbamate (—O—C(═O)(NH)—S—); siloxane (—O—SiH₂—O—); and N,N′-dimethylhydrazine (—CH₂—N(CH₃)—N(CH₃)—). Modified internucleoside linkages, compared to naturally occurring phosphodiester internucleoside linkages, can be used to alter, typically increase, nuclease resistance of the oligonucleotide. In certain embodiments, internucleoside linkages having a chiral atom can be prepared as a racemic mixture, or as separate enantiomers. Methods of preparation of phosphorous-containing and non-phosphorous-containing internucleoside linkages are well known to those skilled in the art.

[0392] In certain embodiments, a modified internucleoside linkage is any of those described in WO/2021/030778, incorporated by reference herein. In certain embodiments, a modified internucleoside linkage comprises the formula:

[chemical structure]

wherein independently for each internucleoside linking group of the modified oligonucleotide:
[0393] X is selected from O or S;
[0394] R₁ is selected from H, C₁-C₆ alkyl, and substituted C₁-C₆ alkyl; and
[0395] T is selected from SO₂R₂, C(═O)R₃, and P(═O)R₄R₅, wherein:
[0396] R₂ is selected from an aryl, a substituted aryl, a heterocycle, a substituted heterocycle, an aromatic heterocycle, a substituted aromatic heterocycle, a diazole, a substituted diazole, a C₁-C₆ alkoxy, C₁-C₆ alkyl, C₁-C₆ alkenyl, C₁-C₆ alkynyl, substituted C₁-C₆ alkyl, substituted C₁-C₆ alkenyl substituted C₁-C₆ alkynyl, and a conjugate group;
[0397] R₃ is selected from an aryl, a substituted aryl, CH₃, N(CH₃)₂, OCH₃ and a conjugate group;
[0398] R₄ is selected from OCH₃, OH, C₁-C₆ alkyl, substituted C₁-C₆ alkyl and a conjugate group; and
[0399] R₅ is selected from OCH₃, OH, C₁-C₆ alkyl, and substituted C₁-C₆ alkyl.
   In certain embodiments, a modified internucleoside linkage comprises a mesyl phosphoramidate linking group having a formula:

[chemical structure]

In certain embodiments, a mesyl phosphoramidate internucleoside linkage may comprise a chiral center. In certain embodiments, modified oligonucleotides comprising (Rp) and/or (Sp) mesyl phosphoramidates comprise one or more of the following formulas, respectively, wherein “B” indicates a nucleobase:

[chemical structure]

[0400] Representative internucleoside linkages having a chiral center include but are not limited to alkylphosphonates and phosphorothioates. Modified oligonucleotides comprising internucleoside linkages having a chiral center can be prepared as populations of modified oligonucleotides comprising stereorandom internucleoside linkages, or as populations of modified oligonucleotides comprising phosphorothioate internucleoside linkages in particular stereochemical configurations. In certain embodiments, populations of modified oligonucleotides comprise phosphorothioate internucleoside linkages wherein all of the phosphorothioate internucleoside linkages are stereorandom. Such modified oligonucleotides can be generated using synthetic methods that result in random selection of the stereochemical configuration of each phosphorothioate internucleoside linkage. Nonetheless, as is well understood by those of skill in the art, each individual phosphorothioate of each individual oligonucleotide molecule has a defined stereoconfiguration. In certain embodiments, populations of modified oligonucleotides are enriched for modified oligonucleotides comprising one or more particular phosphorothioate internucleoside linkage in a particular, independently selected stereochemical configuration. In certain embodiments, the particular configuration of the particular phosphorothioate internucleoside linkage is present in at least 65% of the molecules in the population. In certain embodiments, the particular configuration of the particular phosphorothioate internucleoside linkage is present in at least 70% of the molecules in the population. In certain embodiments, the particular configuration of the particular phosphorothioate internucleoside linkage is present in at least 80% of the molecules in the population. In certain embodiments, the particular configuration of the particular phosphorothioate internucleoside linkage is present in at least 90% of the molecules in the population. In certain embodiments, the particular configuration of the particular phosphorothioate internucleoside linkage is present in at least 99% of the molecules in the population. Such chirally enriched populations of modified oligonucleotides can be generated using synthetic methods known in the art, e.g., methods described in Oka et al., JACS, 2003, 125, 8307, Wan et al., Nuc. Acid. Res., 2014, 42, 13456, and WO 2017/015555. In certain embodiments, a population of modified oligonucleotides is enriched for modified oligonucleotides having at least one indicated phosphorothioate in the (Sp) configuration. In certain embodiments, a population of modified oligonucleotides is enriched for modified oligonucleotides having at least one phosphorothioate in the (Rp) configuration. In certain embodiments, modified oligonucleotides comprising (Rp) and/or (Sp) phosphorothioates comprise one or more of the following formulas, respectively, wherein “B” indicates a nucleobase:

[chemical structure]

Unless otherwise indicated, chiral internucleoside linkages of modified oligonucleotides described herein can be stereorandom or in a particular stereochemical configuration.

[0401] Neutral internucleoside linkages include, without limitation, phosphotriesters, methylphosphonates, MMI (3′-CH₂—N(CH₃)—O-5′), amide-3 (3′-CH₂—C(═O)—N(H)-5′), amide-4 (3′-CH₂—N(H)—C(═O)-5′), formacetal (3′-O—CH₂—O-5′), methoxypropyl (MOP), and thioformacetal (3′-S—CH₂—O-5′). Further neutral internucleoside linkages include nonionic linkages comprising siloxane (dialkylsiloxane), carboxylate ester, carboxamide, sulfide, sulfonate ester and amides (see e.g., Carbohydrate Modifications in Antisense Research; Y. S. Sanghvi and P. D. Cook, Eds., ACS Symposium Series 580; Chapters 3 and 4, 40-65). Further neutral internucleoside linkages include nonionic linkages comprising mixed N, O, S and CH₂ component parts.

[0402] In certain embodiments, modified oligonucleotides comprise one or more inverted nucleoside, as shown below:

[chemical structure]

wherein each Bx independently represents any nucleobase.

[0403] In certain embodiments, an inverted nucleoside is terminal (i.e., the last nucleoside on one end of an oligonucleotide) and so only one internucleoside linkage depicted above will be present. In certain such embodiments, additional features (such as a conjugate group) may be attached to the inverted nucleoside. Such terminal inverted nucleosides can be attached to either or both ends of an oligonucleotide.

[0404] In certain embodiments, such groups lack a nucleobase and are referred to herein as inverted sugar moieties. In certain embodiments, an inverted sugar moiety is terminal (i.e., attached to the last nucleoside on one end of an oligonucleotide) and so only one internucleoside linkage above will be present. In certain such embodiments, additional features (such as a conjugate group) may be attached to the inverted sugar moiety. Such terminal inverted sugar moieties can be attached to either or both ends of an oligonucleotide.

[0405] In certain embodiments, nucleic acids can be linked 2′ to 5′ rather than the standard 3′ to 5′ linkage. Such a linkage is illustrated below.

[chemical structure]

wherein each Bx represents any nucleobase.

### B. Certain Motifs

[0406] In certain embodiments, modified oligonucleotides comprise one or more modified nucleosides comprising a modified sugar moiety. In certain embodiments, modified oligonucleotides comprise one or more modified nucleosides comprising a modified nucleobase. In certain embodiments, modified oligonucleotides comprise one or more modified internucleoside linkage. In such embodiments, the modified, unmodified, and differently modified sugar moieties, nucleobases, and/or internucleoside linkages of a modified oligonucleotide define a pattern or motif. In certain embodiments, the patterns of sugar moieties, nucleobases, and internucleoside linkages are each independent of one another. Thus, a modified oligonucleotide may be described by its sugar motif, nucleobase motif and/or internucleoside linkage motif (as used herein, nucleobase motif describes the modifications to the nucleobases independent of the sequence of nucleobases).

### 1. Certain Sugar Motifs

[0407] In certain embodiments, oligonucleotides comprise one or more type of modified sugar and/or unmodified sugar moiety arranged along the oligonucleotide or portion thereof in a defined pattern or sugar motif. In certain instances, such sugar motifs include but are not limited to any of the sugar modifications discussed herein.

### Gapmer Oligonucleotides

[0408] In certain embodiments, modified oligonucleotides comprise or consist of a region having a gapmer motif, which is defined by two external regions or “wings” and a central or internal region or “gap.” The three regions of a gapmer motif (the 5′-wing, the gap, and the 3′-wing) form a contiguous sequence of nucleosides wherein at least some of the sugar moieties of the nucleosides of each of the wings differ from at least some of the sugar moieties of the nucleosides of the gap. Specifically, at least the sugar moieties of the nucleosides of each wing that are closest to the gap (the 3′-most nucleoside of the 5′-wing and the 5′-most nucleoside of the 3′-wing) differ from the sugar moiety of the neighboring gap nucleosides, thus defining the boundary between the wings and the gap (i.e., the wing/gap junction). In certain embodiments, the sugar moieties within the gap are the same as one another. In certain embodiments, the gap includes one or more nucleoside having a sugar moiety that differs from the sugar moiety of one or more other nucleosides of the gap. In certain embodiments, the sugar motifs of the two wings are the same as one another (symmetric gapmer). In certain embodiments, the sugar motif of the 5′-wing differs from the sugar motif of the 3′-wing (asymmetric gapmer).

[0409] In certain embodiments, the wings of a gapmer comprise 1-6 nucleosides. In certain embodiments, each nucleoside of each wing of a gapmer comprises a modified sugar moiety. In certain embodiments, at least one nucleoside of each wing of a gapmer comprises a modified sugar moiety. In certain embodiments, at least two nucleosides of each wing of a gapmer comprises a modified sugar moiety. In certain embodiments, at least three nucleosides of each wing of a gapmer comprises a modified sugar moiety. In certain embodiments, at least four nucleosides of each wing of a gapmer comprises a modified sugar moiety. In certain embodiments, at least five nucleosides of each wing of a gapmer comprises a modified sugar moiety.

[0410] In certain embodiments, the gap of a gapmer comprises 7-12 nucleosides. In certain embodiments, each nucleoside of the gap of a gapmer comprises a 2′-β-D-deoxyribosyl sugar moiety. In certain embodiments, at least six nucleosides of the gap of a gapmer comprise a 2′-β-D-deoxyribosyl sugar moiety. In certain embodiments, each nucleoside of the gap of a gapmer comprises a 2′-β-D-deoxyribosyl sugar moiety. In certain embodiments, at least one nucleoside of the gap of a gapmer comprises a modified sugar moiety. In certain embodiments, at least one nucleoside of the gap of a gapmer comprises a 2′-OMe modified sugar moiety.

[0411] In certain embodiments, the gapmer is a deoxy gapmer. In certain embodiments, the nucleosides on the gap side of each wing/gap junction comprise 2′-β-D-deoxyribosyl sugar moieties and the nucleosides on the wing sides of each wing/gap junction comprise modified sugar moieties. In certain embodiments, at least six nucleosides of the gap of a gapmer comprise a 2′-β-D-deoxyribosyl sugar moiety. In certain embodiments, each nucleoside of the gap comprises a 2′-β-D-deoxyribosyl sugar moiety. In certain embodiments, each nucleoside of each wing of a gapmer comprises a modified sugar moiety. In certain embodiments, one nucleoside of the gap comprises a modified sugar moiety and each remaining nucleoside of the gap comprises a 2′-β-D-deoxyribosyl sugar moiety.

[0412] In certain embodiments, modified oligonucleotides comprise or consist of a portion having a fully modified sugar motif. In such embodiments, each nucleoside of the fully modified portion of the modified oligonucleotide comprises a modified sugar moiety. In certain embodiments, each nucleoside of the entire modified oligonucleotide comprises a modified sugar moiety. In certain embodiments, modified oligonucleotides comprise or consist of a portion having a fully modified sugar motif, wherein each nucleoside within the fully modified portion comprises the same modified sugar moiety, referred to herein as a uniformly modified sugar motif. In certain embodiments, a fully modified oligonucleotide is a uniformly modified oligonucleotide. In certain embodiments, each nucleoside of a uniformly modified oligonucleotide comprises the same 2′-modification.

[0413] Herein, the lengths (number of nucleosides) of the three regions of a gapmer may be provided using the notation [#of nucleosides in the 5′-wing]-[#of nucleosides in the gap]-[#of nucleosides in the 3′-wing]. Thus, a 5-10-5 gapmer consists of 5 linked nucleosides in each wing and 10 linked nucleosides in the gap. Where such nomenclature is followed by a specific modification, that modification is the modification in each sugar moiety of each wing and the gap nucleosides comprises a 2′-β-D-deoxyribosyl sugar moiety. Thus, a 5-10-5 MOE gapmer consists of 5 linked 2′-MOE nucleosides in the 5′-wing, 10 linked a 2′-β-D-deoxynucleosides in the gap, and 5 linked 2′-MOE nucleosides in the 3′-wing. A 3-10-3 cEt gapmer consists of 3 linked cEt nucleosides in the 5′-wing, 10 linked 2′-β-D-deoxynucleosides in the gap, and 3 linked cEt nucleosides in the 3′-wing. A 5-8-5 gapmer consists of 5 linked nucleosides comprising a modified sugar moiety in the 5′-wing, 8 linked a 2′-β-D-deoxynucleosides in the gap, and 5 linked nucleosides comprising a modified sugar moiety in the 3′-wing. A mixed wing gapmer has at least two different modified sugars in the 5′ and/or 3′ wing. A 5-8-5 or 5-8-4 mixed wing gapmer has at least two different modified sugar moieties in the 5′- and/or the 3′-wing.

[0414] In certain embodiments, modified oligonucleotides are 5-10-5 MOE gapmers. In certain embodiments, modified oligonucleotides are 6-10-4 MOE gapmers. In certain embodiments, modified oligonucleotides are 4-10-6 MOE gapmers. In certain embodiments, modified oligonucleotides are 5-8-4 MOE gapmers. In certain embodiments, modified oligonucleotides are 3-10-7 MOE gapmers. In certain embodiments, modified oligonucleotides are 7-10-3 MOE gapmers. In certain embodiments, modified oligonucleotides are 5-8-5 MOE gapmers. In certain embodiments, modified oligonucleotides are 5-9-5 MOE gapmers. In certain embodiments, modified oligonucleotides are X-Y-Z MOE gapmers, wherein X and Z are independently selected from 1, 2, 3, 4, 5, 6, or 7 linked 2′-MOE nucleosides and Y is selected from 7, 8, 9, 10, or 11 linked deoxynucleosides.

[0415] In certain embodiments, modified oligonucleotides have a sugar motif selected from the following (5′ to 3′): eeeeeddddddddddeeeee, wherein ‘d’ represents a 2′-β-D-deoxyribosyl sugar moiety, and ‘e’ represents a 2′-O(CH₂)₂OCH₃ ribosyl sugar moiety. In certain embodiments, modified oligonucleotides have a sugar motif selected from the following (5′ to 3′): eeeeeeddddddddddeeee, wherein ‘d’ represents a 2′-β-D-deoxyribosyl sugar moiety, and ‘e’ represents a 2′-O(CH₂)₂OCH₃ ribosyl sugar moiety. In certain embodiments, modified oligonucleotides have a sugar motif selected from the following (5′ to 3′): eeeeedddddddddeeeee, wherein ‘d’ represents a 2′-β-D-deoxyribosyl sugar moiety, and ‘e’ represents a 2′-O(CH₂)₂OCH₃ ribosyl sugar moiety.

### 2. Certain Nucleobase Motifs

[0416] In certain embodiments, oligonucleotides comprise modified and/or unmodified nucleobases arranged along the oligonucleotide or portion thereof in a defined pattern or motif. In certain embodiments, each nucleobase is modified. In certain embodiments, none of the nucleobases are modified. In certain embodiments, each purine or each pyrimidine is modified. In certain embodiments, each adenine is modified. In certain embodiments, each guanine is modified. In certain embodiments, each thymine is modified. In certain embodiments, each uracil is modified. In certain embodiments, each cytosine is modified. In certain embodiments, some or all of the cytosine nucleobases in a modified oligonucleotide are 5-methylcytosines. In certain embodiments, all of the cytosine nucleobases are 5-methylcytosines and all of the other nucleobases of the modified oligonucleotide are unmodified nucleobases.

[0417] In certain embodiments, modified oligonucleotides comprise a block of modified nucleobases. In certain such embodiments, the block is at the 3′-end of the oligonucleotide. In certain embodiments the block is within 3 nucleosides of the 3′-end of the oligonucleotide. In certain embodiments, the block is at the 5′-end of the oligonucleotide. In certain embodiments, the block is within 3 nucleosides of the 5′-end of the oligonucleotide.

[0418] In certain embodiments, oligonucleotides having a gapmer motif comprise a nucleoside comprising a modified nucleobase. In certain such embodiments, one nucleoside comprising a modified nucleobase is in the central gap of an oligonucleotide having a gapmer motif. In certain such embodiments, the sugar moiety of the nucleoside is a 2′-β-D-deoxyribosyl sugar moiety. In certain embodiments, the modified nucleobase is selected from: a 2-thiopyrimidine and a 5-propynepyrimidine.

### 3. Certain Internucleoside Linkage Motifs

[0419] In certain embodiments, oligonucleotides comprise modified and/or unmodified internucleoside linkages arranged along the oligonucleotide or portion thereof in a defined pattern or motif. In certain embodiments, each internucleoside linking group is a phosphodiester internucleoside linkage (P(O₂)═O). In certain embodiments, each internucleoside linking group of a modified oligonucleotide is a phosphorothioate internucleoside linkage (P(O₂)═S). In certain embodiments, each internucleoside linkage of a modified oligonucleotide is independently selected from a phosphorothioate internucleoside linkage and phosphodiester internucleoside linkage. In certain embodiments, each phosphorothioate internucleoside linkage is independently selected from a stereorandom phosphorothioate, a (Sp) phosphorothioate, and a (Rp) phosphorothioate.

[0420] In certain embodiments, the sugar motif of a modified oligonucleotide is a gapmer and the internucleoside linkages within the gap are all modified. In certain embodiments, some or all of the internucleoside linkages in the wings are unmodified phosphodiester internucleoside linkages. In certain embodiments, the terminal internucleoside linkages are modified. In certain embodiments, the sugar motif of a modified oligonucleotide is a gapmer, and the internucleoside linkage motif comprises at least one phosphodiester internucleoside linkage in at least one wing, wherein the at least one phosphodiester internucleoside linkage is not a terminal internucleoside linkage, and the remaining internucleoside linkages are phosphorothioate internucleoside linkages. In certain embodiments, all of the phosphorothioate internucleoside linkages are stereorandom. In certain embodiments, all of the phosphorothioate internucleoside linkages in the wings are (Sp) phosphorothioates, and the gap comprises at least one Sp, Sp, or Rp motif. In certain embodiments, populations of modified oligonucleotides are enriched for modified oligonucleotides comprising such internucleoside linkage motifs.

[0421] In certain embodiments, all of the internucleoside linkages are either phosphodiester internucleoside linkages or phosphorothioate internucleoside linkages, and the chiral motif is (5′ to 3′): Sp-o-o-o-Sp-Sp-Sp-Rp-Sp-Sp-Rp-Sp-Sp-Sp-Sp-Sp-Sp-Sp-Sp or Sp-o-o-o-Sp-Sp-Sp-Rp-Sp-Sp-Sp-Sp-Sp-Sp-Sp-Sp-Sp-Sp-Sp, wherein each ‘Sp’ represents a (Sp) phosphorothioate internucleoside linkage, each ‘Rp’ is a Rp internucleoside linkage, and each ‘o’ represents a phosphodiester internucleoside linkage. In certain embodiments, populations of modified oligonucleotides are enriched for modified oligonucleotides comprising such internucleoside linkage motifs.

[0422] In certain embodiments, modified oligonucleotides have an internucleoside linkage motif of soooosssssssssssooss, wherein each “s” represents a phosphorothioate internucleoside linkage and each “o” represents a phosphodiester internucleoside linkage. In certain embodiments, modified oligonucleotides have an internucleoside linkage motif of sososssssssssssooss, wherein each “s” represents a phosphorothioate internucleoside linkage and each “o” represents a phosphodiester internucleoside linkage. In certain embodiments, modified oligonucleotides have an internucleoside linkage motif of sooosssssssssssooss, wherein each “s” represents a phosphorothioate internucleoside linkage and each “o” represents a phosphodiester internucleoside linkage. In certain embodiments, modified oligonucleotides have an internucleoside linkage motif of soooossssssssssooss, wherein each “s” represents a phosphorothioate internucleoside linkage and each “o” represents a phosphodiester internucleoside linkage. In certain embodiments, modified oligonucleotides have an internucleoside linkage motif of sooosssssssssssooos, wherein each “s” represents a phosphorothioate internucleoside linkage and each “o” represents a phosphodiester internucleoside linkage. In certain embodiments, modified oligonucleotides have an internucleoside linkage motif of sooossssssssssooss, wherein each “s” represents a phosphorothioate internucleoside linkage and each “o” represents a phosphodiester internucleoside linkage. In certain embodiments, modified oligonucleotides have an internucleoside linkage motif of sooooossssssssssoss, wherein each “s” represents a phosphorothioate internucleoside linkage and each “o” represents a phosphodiester internucleoside linkage.

[0423] In certain embodiments, modified oligonucleotides have an internucleoside linkage motif comprising one or more mesyl phosphoramidate linking groups. In certain embodiments, one or more phosphorothioate internucleoside linkages or one or more phosphodiester internucleoside linkages of the internucleoside linkage motifs herein is substituted with a mesyl phosphoramidates linking group.

### C. Certain Lengths

[0424] It is possible to increase or decrease the length of an oligonucleotide without eliminating activity. For example, in Woolf et al., Proc. Natl. Acad. Sci. USA, 1992, 89, 7305-7309, 1992), a series of oligonucleotides 13-25 nucleobases in length were tested for their ability to induce cleavage of a target nucleic acid in an oocyte injection model. Oligonucleotides 25 nucleobases in length with 8 or 11 mismatch bases near the ends of the oligonucleotides were able to direct specific cleavage of the target nucleic acid, albeit to a lesser extent than the oligonucleotides that contained no mismatches. Similarly, target specific cleavage was achieved using 13 nucleobase oligonucleotides, including those with 1 or 3 mismatches.

[0425] In certain embodiments, oligonucleotides (including modified oligonucleotides) can have any of a variety of ranges of lengths. In certain embodiments, oligonucleotides consist of X to Y linked nucleosides, where X represents the fewest number of nucleosides in the range and Y represents the largest number nucleosides in the range. In certain such embodiments, X and Y are each independently selected from 8, 9, 10, 11, 12, 13, 14, 15, 16, 17, 18, 19, 20, 21, 22, 23, 24, 25, 26, 27, 28, 29, 30, 31, 32, 33, 34, 35, 36, 37, 38, 39, 40, 41, 42, 43, 44, 45, 46, 47, 48, 49, and 50; provided that X≤Y. For example, in certain embodiments, oligonucleotides consist of 12 to 13, 12 to 14, 12 to 15, 12 to 16, 12 to 17, 12 to 18, 12 to 19, 12 to 20, 12 to 21, 12 to 22, 12 to 23, 12 to 24, 12 to 25, 12 to 26, 12 to 27, 12 to 28, 12 to 29, 12 to 30, 13 to 14, 13 to 15, 13 to 16, 13 to 17, 13 to 18, 13 to 19, 13 to 20, 13 to 21, 13 to 22, 13 to 23, 13 to 24, 13 to 25, 13 to 26, 13 to 27, 13 to 28, 13 to 29, 13 to 30, 14 to 15, 14 to 16, 14 to 17, 14 to 18, 14 to 19, 14 to 20, 14 to 21, 14 to 22, 14 to 23, 14 to 24, 14 to 25, 14 to 26, 14 to 27, 14 to 28, 14 to 29, 14 to 30, 15 to 16, 15 to 17, 15 to 18, 15 to 19, 15 to 20, 15 to 21, 15 to 22, 15 to 23, 15 to 24, 15 to 25, 15 to 26, 15 to 27, 15 to 28, 15 to 29, 15 to 30, 16 to 17, 16 to 18, 16 to 19, 16 to 20, 16 to 21, 16 to 22, 16 to 23, 16 to 24, 16 to 25, 16 to 26, 16 to 27, 16 to 28, 16 to 29, 16 to 30, 17 to 18, 17 to 19, 17 to 20, 17 to 21, 17 to 22, 17 to 23, 17 to 24, 17 to 25, 17 to 26, 17 to 27, 17 to 28, 17 to 29, 17 to 30, 18 to 19, 18 to 20, 18 to 21, 18 to 22, 18 to 23, 18 to 24, 18 to 25, 18 to 26, 18 to 27, 18 to 28, 18 to 29, 18 to 30, 19 to 20, 19 to 21, 19 to 22, 19 to 23, 19 to 24, 19 to 25, 19 to 26, 19 to 27, 19 to 28, 19 to 29, 19 to 30, 20 to 21, 20 to 22, 20 to 23, 20 to 24, 20 to 25, 20 to 26, 20 to 27, 20 to 28, 20 to 29, 20 to 30, 21 to 22, 21 to 23, 21 to 24, 21 to 25, 21 to 26, 21 to 27, 21 to 28, 21 to 29, 21 to 30, 22 to 23, 22 to 24, 22 to 25, 22 to 26, 22 to 27, 22 to 28, 22 to 29, 22 to 30, 23 to 24, 23 to 25, 23 to 26, 23 to 27, 23 to 28, 23 to 29, 23 to 30, 24 to 25, 24 to 26, 24 to 27, 24 to 28, 24 to 29, 24 to 30, 25 to 26, 25 to 27, 25 to 28, 25 to 29, 25 to 30, 26 to 27, 26 to 28, 26 to 29, 26 to 30, 27 to 28, 27 to 29, 27 to 30, 28 to 29, 28 to 30, or 29 to 30 linked nucleosides.

[0426] In certain embodiments, oligonucleotides consist of 16 linked nucleosides. In certain embodiments, oligonucleotides consist of 17 linked nucleosides. In certain embodiments, oligonucleotides consist of 18 linked nucleosides. In certain embodiments, oligonucleotides consist of 19 linked nucleosides. In certain embodiments, oligonucleotides consist of 20 linked nucleosides.

### D. Certain Modified Oligonucleotides

[0427] In certain embodiments, the above modifications (sugar, nucleobase, internucleoside linkage) are incorporated into a modified oligonucleotide. In certain embodiments, modified oligonucleotides are characterized by their modification motifs and overall lengths. In certain embodiments, such parameters are each independent of one another. Thus, unless otherwise indicated, each internucleoside linkage of an oligonucleotide having a gapmer sugar motif may be modified or unmodified and may or may not follow the gapmer modification pattern of the sugar modifications. For example, the internucleoside linkages within the wing regions of a sugar gapmer may be the same or different from one another and may be the same or different from the internucleoside linkages of the gap region of the sugar motif. Likewise, such sugar gapmer oligonucleotides may comprise one or more modified nucleobase independent of the gapmer pattern of the sugar modifications. Unless otherwise indicated, all modifications are independent of nucleobase sequence.

### E. Certain Populations of Modified Oligonucleotides

[0428] Populations of modified oligonucleotides in which all of the modified oligonucleotides of the population have the same molecular formula can be stereorandom populations or chirally enriched populations. All of the chiral centers of all of the modified oligonucleotides are stereorandom in a stereorandom population. In a chirally enriched population, at least one particular chiral center is not stereorandom in the modified oligonucleotides of the population. In certain embodiments, the modified oligonucleotides of a chirally enriched population are enriched for β-D ribosyl sugar moieties, and all of the phosphorothioate internucleoside linkages are stereorandom. In certain embodiments, the modified oligonucleotides of a chirally enriched population are enriched for both β-D ribosyl sugar moieties and at least one, particular phosphorothioate internucleoside linkage in a particular stereochemical configuration.

### F. Nucleobase Sequence

[0429] In certain embodiments, oligonucleotides (unmodified or modified oligonucleotides) are further described by their nucleobase sequence. In certain embodiments oligonucleotides have a nucleobase sequence that is complementary to a second oligonucleotide or an identified reference nucleic acid, such as a target nucleic acid. In certain such embodiments, a portion of an oligonucleotide has a nucleobase sequence that is complementary to a second oligonucleotide or an identified reference nucleic acid, such as a target nucleic acid. In certain embodiments, the nucleobase sequence of a portion or entire length of an oligonucleotide is at least 50%, at least 60%, at least 70%, at least 80%, at least 85%, at least 90%, at least 95%, or 100% complementary to the second oligonucleotide or nucleic acid, such as a target nucleic acid.

### II. Certain Oligomeric Compounds

[0430] In certain embodiments, provided herein are oligomeric compounds, which consist of an oligonucleotide (modified or unmodified) and optionally one or more conjugate groups and/or terminal groups. Conjugate groups consist of one or more conjugate moiety and a conjugate linker which links the conjugate moiety to the oligonucleotide. Conjugate groups may be attached to either or both ends of an oligonucleotide and/or at any internal position. In certain embodiments, conjugate groups are attached to the 2-position of a nucleoside of a modified oligonucleotide. In certain embodiments, conjugate groups that are attached to either or both ends of an oligonucleotide are terminal groups. In certain such embodiments, conjugate groups or terminal groups are attached at the 3′ and/or 5′-end of oligonucleotides. In certain such embodiments, conjugate groups (or terminal groups) are attached at the 3′-end of oligonucleotides. In certain embodiments, conjugate groups are attached near the 3′-end of oligonucleotides. In certain embodiments, conjugate groups (or terminal groups) are attached at the 5′-end of oligonucleotides. In certain embodiments, conjugate groups are attached near the 5′-end of oligonucleotides.

[0431] Examples of terminal groups include but are not limited to conjugate groups, capping groups, phosphate moieties, protecting groups, abasic nucleosides, modified or unmodified nucleosides, and two or more nucleosides that are independently modified or unmodified.

### A. Certain Conjugate Groups

[0432] In certain embodiments, oligonucleotides are covalently attached to one or more conjugate groups. In certain embodiments, conjugate groups modify one or more properties of the attached oligonucleotide, including but not limited to pharmacodynamics, pharmacokinetics, stability, binding, absorption, tissue distribution, cellular distribution, cellular uptake, charge and clearance.

[0433] In certain embodiments, conjugation of one or more carbohydrate moieties to a modified oligonucleotide can optimize one or more properties of the modified oligonucleotide. In certain embodiments, the carbohydrate moiety is attached to a modified subunit of the modified oligonucleotide. For example, the ribose sugar of one or more ribonucleotide subunits of a modified oligonucleotide can be replaced with another moiety, e.g. a non-carbohydrate (preferably cyclic) carrier to which is attached a carbohydrate ligand. A ribonucleotide subunit in which the ribose sugar of the subunit has been so replaced is referred to herein as a ribose replacement modification subunit (RRMS), which is a modified sugar moiety. A cyclic carrier may be a carbocyclic ring system, i.e., one or more ring atoms may be a heteroatom, e.g., nitrogen, oxygen, sulphur. The cyclic carrier may be a monocyclic ring system, or may contain two or more rings, e.g. fused rings. The cyclic carrier may be a fully saturated ring system, or it may contain one or more double bonds. In certain embodiments, the modified oligonucleotide is a gapmer.

[0434] In certain embodiments, conjugate groups impart a new property on the attached oligonucleotide, e.g., fluorophores or reporter groups that enable detection of the oligonucleotide. Certain conjugate groups and conjugate moieties have been described previously, for example: cholesterol moiety (Letsinger et al., Proc. Natl. Acad. Sci. USA, 1989, 86, 6553-6556), cholic acid (Manoharan et al., Bioorg. Med. Chem. Lett., 1994, 4, 1053-1060), a thioether, e.g., hexyl-S-tritylthiol (Manoharan et al., Ann. N.Y. Acad. Sci., 1992, 660, 306-309; Manoharan et al., Bioorg. Med. Chem. Lett., 1993, 3, 2765-2770), a thiocholesterol (Oberhauser et al., Nucl. Acids Res., 1992, 20, 533-538), an aliphatic chain, e.g., do-decan-diol or undecyl residues (Saison-Behmoaras et al., EMBO J., 1991, 10, 1111-1118; Kabanov et al., FEBS Lett., 1990, 259, 327-330; Svinarchuk et al., Biochimie, 1993, 75, 49-54), a phospholipid, e.g., di-hexadecyl-rac-glycerol or triethyl-ammonium 1,2-di-O-hexadecyl-rac-glycero-3-H-phosphonate (Manoharan et al., Tetrahedron Lett., 1995, 36, 3651-3654; Shea et al., Nucl. Acids Res., 1990, 18, 3777-3783), a polyamine or a polyethylene glycol chain (Manoharan et al., Nucleosides & Nucleotides, 1995, 14, 969-973), or adamantane acetic acid a palmityl moiety (Mishra et al., Biochim. Biophys. Acta, 1995, 1264, 229-237), an octadecylamine or hexylamino-carbonyl-oxycholesterol moiety (Crooke et al., J. Pharmacol. Exp. Ther., 1996, 277, 923-937), a tocopherol group (Nishina et al., Molecular Therapy Nucleic Acids, 2015, 4, e220; and Nishina et al., Molecular Therapy, 2008, 16, 734-740), or a GalNAc cluster (e.g., WO2014/179620).

[0435] In certain embodiments, the conjugate group may comprise a conjugate moiety selected from any of a C22 alkyl, C20 alkyl, C16 alkyl, C10 alkyl, C21 alkyl, C19 alkyl, C18 alkyl, C15 alkyl, C14 alkyl, C13 alkyl, C12 alkyl, C11 alkyl, C9 alkyl, C8 alkyl, C7 alkyl, C6 alkyl, C5 alkyl, C22 alkenyl, C20 alkenyl, C16 alkenyl, C10 alkenyl, C21 alkenyl, C19 alkenyl, C18 alkenyl, C15 alkenyl, C14 alkenyl, C13 alkenyl, C12 alkenyl, C11 alkenyl, C9 alkenyl, C8 alkenyl, C7 alkenyl, C6 alkenyl, or C5 alkenyl.

[0436] In certain embodiments, the conjugate group may comprise a conjugate moiety selected from any of a C22 alkyl, C20 alkyl, C16 alkyl, C10 alkyl, C21 alkyl, C19 alkyl, C18 alkyl, C15 alkyl, C14 alkyl, C13 alkyl, C12 alkyl, C11 alkyl, C9 alkyl, C8 alkyl, C7 alkyl, C6 alkyl, or C5 alkyl, where the alkyl chain has one or more unsaturated bonds.

[0437] In certain embodiments, a conjugate group is a lipid having the following structure:

[chemical structure]

### 1. Conjugate Moieties

[0438] Conjugate moieties include, without limitation, intercalators, reporter molecules, polyamines, polyamides, peptides, carbohydrates, antibodies, vitamin moieties, polyethylene glycols, thioethers, polyethers, cholesterols, thiocholesterols, cholic acid moieties, folate, lipids, lipophilic groups, phospholipids, biotin, phenazine, phenanthridine, anthraquinone, adamantane, acridine, fluoresceins, rhodamines, coumarins, fluorophores, and dyes.

[0439] In certain embodiments, a conjugate moiety comprises an active drug substance, for example, aspirin, warfarin, phenylbutazone, ibuprofen, suprofen, fen-bufen, ketoprofen, (S)-(+)-pranoprofen, carprofen, dansylsarcosine, 2,3,5-triiodobenzoic acid, fingolimod, flufenamic acid, folinic acid, a benzothiadiazide, chlorothiazide, a diazepine, indo-methicin, a barbiturate, a cephalosporin, a sulfa drug, an antidiabetic, an antibacterial or an antibiotic.

### 2. Conjugate Linkers

[0440] Conjugate moieties are attached to oligonucleotides through conjugate linkers. In certain oligomeric compounds, the conjugate linker is a single chemical bond (i.e., the conjugate moiety is attached directly to an oligonucleotide through a single bond). In certain oligomeric compounds, a conjugate moiety is attached to an oligonucleotide via a more complex conjugate linker comprising one or more conjugate linker moieties, which are sub-units making up a conjugate linker. In certain embodiments, the conjugate linker comprises a chain structure, such as a hydrocarbyl chain, or an oligomer of repeating units such as ethylene glycol, nucleosides, or amino acid units.

[0441] In certain embodiments, a conjugate linker comprises pyrrolidine.

[0442] In certain embodiments, a conjugate linker comprises one or more groups selected from alkyl, amino, oxo, amide, disulfide, polyethylene glycol, ether, thioether, and hydroxylamino. In certain such embodiments, the conjugate linker comprises groups selected from alkyl, amino, oxo, amide and ether groups. In certain embodiments, the conjugate linker comprises groups selected from alkyl and amide groups. In certain embodiments, the conjugate linker comprises groups selected from alkyl and ether groups. In certain embodiments, the conjugate linker comprises at least one phosphorus moiety. In certain embodiments, the conjugate linker comprises at least one phosphate group. In certain embodiments, the conjugate linker includes at least one neutral linking group.

[0443] In certain embodiments, conjugate linkers, including the conjugate linkers described above, are bifunctional linking moieties, e.g., those known in the art to be useful for attaching conjugate groups to parent compounds, such as the oligonucleotides provided herein. In general, a bifunctional linking moiety comprises at least two functional groups. One of the functional groups is selected to bind to a particular site on a parent compound and the other is selected to bind to a conjugate group. Examples of functional groups used in a bifunctional linking moiety include but are not limited to electrophiles for reacting with nucleophilic groups and nucleophiles for reacting with electrophilic groups. In certain embodiments, bifunctional linking moieties comprise one or more groups selected from amino, hydroxyl, carboxylic acid, thiol, alkyl, alkenyl, and alkynyl.

[0444] Examples of conjugate linkers include but are not limited to pyrrolidine, 8-amino-3,6-dioxaoctanoic acid (ADO), succinimidyl 4-(N-maleimidomethyl) cyclohexane-1-carboxylate (SMCC) and 6-aminohexanoic acid (AHEX or AHA). Other conjugate linkers include but are not limited to substituted or unsubstituted C₁-C₁₀ alkyl, substituted or unsubstituted C₂-C₁₀ alkenyl or substituted or unsubstituted C₂-C₁₀ alkynyl, wherein a nonlimiting list of preferred substituent groups includes hydroxyl, amino, alkoxy, carboxy, benzyl, phenyl, nitro, thiol, thioalkoxy, halogen, alkyl, aryl, alkenyl and alkynyl.

[0445] In certain embodiments, conjugate linkers comprise 1-10 linker-nucleosides. In certain embodiments, conjugate linkers comprise 2-5 linker-nucleosides. In certain embodiments, conjugate linkers comprise exactly 3 linker-nucleosides. In certain embodiments, conjugate linkers comprise the TCA motif. In certain embodiments, such linker-nucleosides are modified nucleosides. In certain embodiments such linker-nucleosides comprise a modified sugar moiety. In certain embodiments, linker-nucleosides are unmodified. In certain embodiments, linker-nucleosides comprise an optionally protected heterocyclic base selected from a purine, substituted purine, pyrimidine or substituted pyrimidine. In certain embodiments, a cleavable moiety is a nucleoside selected from uracil, thymine, cytosine, 4-N-benzoylcytosine, 5-methylcytosine, 4-N-benzoyl-5-methylcytosine, adenine, 6-N-benzoyladenine, guanine and 2-N-isobutyrylguanine. It is typically desirable for linker-nucleosides to be cleaved from the oligomeric compound after it reaches a target tissue. Accordingly, linker-nucleosides are typically linked to one another and to the remainder of the oligomeric compound through cleavable bonds. In certain embodiments, such cleavable bonds are phosphodiester bonds.

[0446] Herein, linker-nucleosides are not considered to be part of the oligonucleotide. Accordingly, in embodiments in which an oligomeric compound comprises an oligonucleotide consisting of a specified number or range of linked nucleosides and/or a specified percent complementarity to a reference nucleic acid and the oligomeric compound also comprises a conjugate group comprising a conjugate linker comprising linker-nucleosides, those linker-nucleosides are not counted toward the length of the oligonucleotide and are not used in determining the percent complementarity of the oligonucleotide for the reference nucleic acid. For example, an oligomeric compound may comprise (1) a modified oligonucleotide consisting of 8-30 nucleosides and (2) a conjugate group comprising 1-10 linker-nucleosides that are contiguous with the nucleosides of the modified oligonucleotide. The total number of contiguous linked nucleosides in such an oligomeric compound is more than 30. Alternatively, an oligomeric compound may comprise a modified oligonucleotide consisting of 8-30 nucleosides and no conjugate group. The total number of contiguous linked nucleosides in such an oligomeric compound is no more than 30. Unless otherwise indicated conjugate linkers comprise no more than 10 linker-nucleosides. In certain embodiments, conjugate linkers comprise no more than 5 linker-nucleosides. In certain embodiments, conjugate linkers comprise no more than 3 linker-nucleosides. In certain embodiments, conjugate linkers comprise no more than 2 linker-nucleosides. In certain embodiments, conjugate linkers comprise no more than 1 linker-nucleoside.

[0447] In certain embodiments, it is desirable for a conjugate group to be cleaved from the oligonucleotide. For example, in certain circumstances oligomeric compounds comprising a particular conjugate moiety are better taken up by a particular cell type, but once the oligomeric compound has been taken up, it is desirable that the conjugate group be cleaved to release the unconjugated or parent oligonucleotide. Thus, certain conjugate linkers may comprise one or more cleavable moieties. In certain embodiments, a cleavable moiety is a cleavable bond. In certain embodiments, a cleavable moiety is a group of atoms comprising at least one cleavable bond. In certain embodiments, a cleavable moiety comprises a group of atoms having one, two, three, four, or more than four cleavable bonds. In certain embodiments, a cleavable moiety is selectively cleaved inside a cell or subcellular compartment, such as a lysosome. In certain embodiments, a cleavable moiety is selectively cleaved by endogenous enzymes, such as nucleases.

[0448] In certain embodiments, a cleavable bond is selected from among: an amide, an ester, an ether, one or both esters of a phosphodiester, a phosphate ester, a carbamate, or a disulfide. In certain embodiments, a cleavable bond is one or both of the esters of a phosphodiester. In certain embodiments, a cleavable moiety comprises a phosphate or phosphodiester. In certain embodiments, the cleavable moiety is a phosphate or phosphodiester linkage between an oligonucleotide and a conjugate moiety or conjugate group.

[0449] In certain embodiments, a cleavable moiety comprises or consists of one or more linker-nucleosides. In certain such embodiments, the one or more linker-nucleosides are linked to one another and/or to the remainder of the oligomeric compound through cleavable bonds. In certain embodiments, such cleavable bonds are unmodified phosphodiester bonds. In certain embodiments, a cleavable moiety is 2′-deoxynucleoside that is attached to either the 3′ or 5′-terminal nucleoside of an oligonucleotide by a phosphodiester internucleoside linkage and covalently attached to the remainder of the conjugate linker or conjugate moiety by a phosphate or phosphorothioate internucleoside linkage. In certain such embodiments, the cleavable moiety is 2′-deoxyadenosine.

### 3. Cell-Targeting Moieties

[0450] In certain embodiments, a conjugate group comprises a cell-targeting moiety. In certain embodiments, a conjugate group has the general formula:

[chemical structure]

[0451] wherein n is from 1 to about 3, m is 0 when n is 1, m is 1 when n is 2 or greater, j is 1 or 0, and k is 1 or 0.

[0452] In certain embodiments, n is 1, j is 1 and k is 0. In certain embodiments, n is 1, j is 0 and k is 1. In certain embodiments, n is 1, j is 1 and k is 1. In certain embodiments, n is 2, j is 1 and k is 0. In certain embodiments, n is 2, j is 0 and k is 1. In certain embodiments, n is 2, j is 1 and k is 1. In certain embodiments, n is 3, j is 1 and k is 0. In certain embodiments, n is 3, j is 0 and k is 1. In certain embodiments, n is 3, j is 1 and k is 1.

[0453] In certain embodiments, conjugate groups comprise cell-targeting moieties that have at least one tethered ligand. In certain embodiments, cell-targeting moieties comprise two tethered ligands covalently attached to a branching group. In certain embodiments, cell-targeting moieties comprise three tethered ligands covalently attached to a branching group.

[0454] In certain embodiments, each ligand of a cell-targeting moiety has an affinity for at least one type of receptor on a target cell. In certain embodiments, each ligand has an affinity for at least one type of receptor on the surface of a mammalian liver cell. In certain embodiments, each ligand has an affinity for the hepatic asialoglycoprotein receptor (ASGP-R). In certain embodiments, each ligand is a carbohydrate.

[0455] In certain embodiments, a conjugate group comprises a cell-targeting conjugate moiety. In certain embodiments, a conjugate group has the general formula:

[chemical structure]

[0456] wherein n is from 1 to about 3, m is 0 when n is 1, m is 1 when n is 2 or greater, j is 1 or 0, and k is 1 or 0.

[0457] In certain embodiments, n is 1, j is 1 and k is 0. In certain embodiments, n is 1, j is 0 and k is 1. In certain embodiments, n is 1, j is 1 and k is 1. In certain embodiments, n is 2, j is 1 and k is 0. In certain embodiments, n is 2, j is 0 and k is 1. In certain embodiments, n is 2, j is 1 and k is 1. In certain embodiments, n is 3, j is 1 and k is 0. In certain embodiments, n is 3, j is 0 and k is 1. In certain embodiments, n is 3, j is 1 and k is 1.

[0458] In certain embodiments, conjugate groups comprise cell-targeting moieties that have at least one tethered ligand. In certain embodiments, cell-targeting moieties comprise two tethered ligands covalently attached to a branching group. In certain embodiments, cell-targeting moieties comprise three tethered ligands covalently attached to a branching group.

[0459] In certain embodiments, conjugate groups comprise cell-targeting moieties that have affinities for transferrin receptor (TfR) (also referred to herein as TfR1 and CD71). In certain embodiments, a conjugate group described herein comprises an anti-TfR1 antibody or fragment thereof. In certain embodiments, the conjugate group comprises a protein or peptide capable of binding TfR1. In certain embodiments, the conjugate group comprises an aptamer capable of binding TfR1. In certain embodiments, the anti-TfR1 antibody or fragment thereof can be any known in the art including but not limited to those described in WO1991/004753; WO2013/103800; WO2014/144060; WO2016/081643; WO2016/179257; WO2016/207240; WO2017/221883; WO2018/129384; WO2018/124121; WO2019/151539; WO2020/132584; WO2020/028864; U.S. Pat. Nos. 7,208,174; 9,034,329; and 10,550,188. In certain embodiments, a fragment of an anti-TfR1 antibody is F(ab′)₂, Fab, Fab′, Fv, or scFv.

[0460] In certain embodiments, the conjugate group comprises a protein or peptide capable of binding TfR1. In certain embodiments, the protein or peptide capable of binding TfR1 can be any known in the art including but not limited to those described in WO2019/140050; WO2020/037150; WO2020/124032; and U.S. Pat. No. 10,138,483.

[0461] In certain embodiments, the conjugate group comprises an aptamer capable of binding TfR1. In certain embodiments, the aptamer capable of binding TfR1 can be any known in the art including but not limited to those described in WO2013/163303; WO2019/033051; and WO2020/245198.

### B. Certain Terminal Groups

[0462] In certain embodiments, oligomeric compounds comprise one or more terminal groups. In certain such embodiments, oligomeric compounds comprise a stabilized 5′-phosphate. Stabilized 5′-phosphates include, but are not limited to 5′-phosphoanates, including, but not limited to 5′-vinylphosphonates. In certain embodiments, terminal groups comprise one or more abasic nucleosides and/or inverted nucleosides. In certain embodiments, terminal groups comprise one or more 2′-linked nucleosides. In certain such embodiments, the 2′-linked nucleoside is an abasic nucleoside.

### III. Antisense Activity

[0463] In certain embodiments, oligomeric compounds and oligomeric duplexes are capable of hybridizing to a target nucleic acid, resulting in at least one antisense activity; such oligomeric compounds and oligomeric duplexes are antisense compounds. In certain embodiments, antisense compounds have antisense activity when they reduce the amount or activity of a target nucleic acid by 25% or more in the standard in vitro assay. In certain embodiments, antisense compounds selectively affect one or more target nucleic acid. Such antisense compounds comprise a nucleobase sequence that hybridizes to one or more target nucleic acid, resulting in one or more desired antisense activity and does not hybridize to one or more non-target nucleic acid or does not hybridize to one or more non-target nucleic acid in such a way that results in significant undesired antisense activity.

[0464] In certain antisense activities, hybridization of an antisense compound to a target nucleic acid results in recruitment of a protein that cleaves the target nucleic acid. For example, certain antisense compounds result in RNase H mediated cleavage of the target nucleic acid. RNase H is a cellular endonuclease that cleaves the RNA strand of an RNA:DNA duplex. The DNA in such an RNA:DNA duplex need not be unmodified DNA. In certain embodiments, described herein are antisense compounds that are sufficiently “DNA-like” to elicit RNase H activity. In certain embodiments, one or more non-DNA-like nucleoside in the gap of a gapmer is tolerated.

[0465] In certain antisense activities, an antisense compound or a portion of an antisense compound is loaded into an RNA-induced silencing complex (RISC), ultimately resulting in cleavage of the target nucleic acid. For example, certain antisense compounds result in cleavage of the target nucleic acid by Argonaute. Antisense compounds that are loaded into RISC are RNAi agents. RNAi agents may be double-stranded (siRNA) or single-stranded (ssRNA).

[0466] In certain embodiments, hybridization of an antisense compound to a target nucleic acid does not result in recruitment of a protein that cleaves that target nucleic acid. In certain embodiments, hybridization of the antisense compound to the target nucleic acid results in alteration of splicing of the target nucleic acid. In certain embodiments, hybridization of an antisense compound to a target nucleic acid results in inhibition of a binding interaction between the target nucleic acid and a protein or other nucleic acid. In certain embodiments, hybridization of an antisense compound to a target nucleic acid results in alteration of translation of the target nucleic acid.

[0467] Antisense activities may be observed directly or indirectly. In certain embodiments, observation or detection of an antisense activity involves observation or detection of a change in an amount of a target nucleic acid or protein encoded by such target nucleic acid, a change in the ratio of splice variants of a nucleic acid or protein and/or a phenotypic change in a cell or subject.

### IV. Certain Target Nucleic Acids

[0468] In certain embodiments, oligomeric compounds comprise or consist of an oligonucleotide comprising a portion that is complementary to a target nucleic acid. In certain embodiments, the target nucleic acid is an endogenous RNA molecule. In certain embodiments, the target nucleic acid encodes a protein. In certain such embodiments, the target nucleic acid is selected from: a mature mRNA and a pre-mRNA, including intronic, exonic and untranslated regions. In certain embodiments, the target nucleic acid is a mature mRNA. In certain embodiments, the target nucleic acid is a pre-mRNA. In certain embodiments, the target region is entirely within an intron. In certain embodiments, the target region spans an intron/exon junction. In certain embodiments, the target region is at least 50% within an intron.

### A. Complementarity/Mismatches to the Target Nucleic Acid

[0469] In certain embodiments, oligonucleotides are complementary to the target nucleic acid over the entire length of the oligonucleotide. In certain embodiments, oligonucleotides are 99%, 95%, 90%, 85%, or 80% complementary to the target nucleic acid. In certain embodiments, oligonucleotides are at least 80% complementary to the target nucleic acid over the entire length of the oligonucleotide and comprise a region that is 100% or fully complementary to a target nucleic acid. In certain embodiments, the region of full complementarity is from 6 to 20, 10 to 18, or 18 to 20 nucleobases in length.

[0470] It is possible to introduce mismatch bases without eliminating activity. For example, Gautschi et al (J. Natl. Cancer Inst. 93:463-471, March 2001) demonstrated the ability of an oligonucleotide having 100% complementarity to the bcl-2 mRNA and having 3 mismatches to the bcl-xL mRNA to reduce the expression of both bcl-2 and bcl-xL in vitro and in vivo. Furthermore, this oligonucleotide demonstrated potent anti-tumor activity in vivo. Maher and Dolnick (Nuc. Acid. Res. 16:3341-3358, 1988) tested a series of tandem 14 nucleobase oligonucleotides, and a 28 and 42 nucleobase oligonucleotides comprised of the sequence of two or three of the tandem oligonucleotides, respectively, for their ability to arrest translation of human DHFR in a rabbit reticulocyte assay. Each of the three 14 nucleobase oligonucleotides alone was able to inhibit translation, albeit at a more modest level than the 28 or 42 nucleobase oligonucleotides.

[0471] In certain embodiments, oligonucleotides are complementary to the target nucleic acid over the entire length of the oligonucleotide. In certain embodiments, oligonucleotides are 99%, 95%, 90%, 85%, or 80% complementary to the target nucleic acid. In certain embodiments, oligonucleotides are at least 80% complementary to the target nucleic acid over the entire length of the oligonucleotide and comprise a portion that is 100% or fully complementary to a target nucleic acid. In certain embodiments, the portion of full complementarity is 6, 7, 8, 9, 10, 11, 12, 13, 14, 15, 16, 17, 18, 19, 20, 21, 22, 23, or 24 nucleobases in length.

[0472] In certain embodiments, oligonucleotides comprise one or more mismatched nucleobases relative to the target nucleic acid. In certain embodiments, antisense activity against the target is reduced by such mismatch, but activity against a non-target is reduced by a greater amount. Thus, in certain embodiments selectivity of the oligonucleotide is improved. In certain embodiments, the mismatch is specifically positioned within an oligonucleotide having a gapmer motif. In certain embodiments, the mismatch is at position 1, 2, 3, 4, 5, 6, 7, 8, 9, 10, or 11 from the 5′-end of the gap region. In certain embodiments, the mismatch is at position 1, 2, 3, 4, 5, or 6 from the 5′-end of the 5′ wing region or the 3′ wing region.

### B. GYS1

[0473] In certain embodiments, oligomeric compounds comprise or consist of an oligonucleotide that is complementary to a target nucleic acid, wherein the target nucleic acid is a glycogen synthase 1 (GYS1) nucleic acid. In certain embodiments, the GYS1 nucleic acid includes a DNA sequence encoding GYS1, or an RNA sequence transcribed from DNA encoding GYS1 (including genomic DNA comprising introns and exons). In certain embodiments, the GYS1 nucleic acid has the sequence set forth in SEQ ID NO: 1 (GENBANK Accession No. NM_002103.4), SEQ ID NO: 2 (the complement of GENBANK Accession No. NC_000019.10 truncated from nucleotides 48965001 to 48996000), SEQ ID NO: 3 (HG19_CHR19:49468258-49499257(−)), SEQ ID NO: 4 (GENBANK Accession No. NG_012923.1), SEQ ID NO: 5 (UCSC ID: UC0002PLP.3), SEQ ID NO: 6 (UCSC ID: UC010EMM.3), SEQ ID NO: 7 (UCSC ID: UC010XZZ.2), SEQ ID NO: 8 (GENBANK Accession No. NM_001161587.1), SEQ ID NO: 9 (GENBANK Accession No. NR_027763.1), SEQ ID NO: 10 (GENBANK Accession No. AK303712.1), or SEQ ID NO: 14 (ENSEMBL GENE ID: ENSG00000104812.15 from Enesmbl Release 108 (October 2022)).

[0474] In certain embodiments, contacting a cell with an oligomeric compound complementary to any one of SEQ ID NOs: 1-10 and 14 reduces the amount of GYS1 RNA in a cell. In certain embodiments, contacting a cell with an oligomeric compound complementary to any one of SEQ ID NOs: 1-10 and 14 reduces the amount of GYS1 protein in a cell. In certain embodiments, the cell is in vitro. In certain embodiments, the cell is in a subject. In certain embodiments, the oligomeric compound consists of a modified oligonucleotide. In certain embodiments, contacting a cell in a subject with an oligomeric compound complementary to any one of SEQ ID NOs: 1-10 and 14 ameliorates one or more symptoms or hallmarks of a polyglucosan disease. In certain embodiments, the polyglucosan disease is Lafora disease. In certain embodiments, the polyglucosan disease is adult polyglucosan body disease (APBD). In certain embodiments, the polyglucosan disease is Pompe disease or Andersen's disease.

[0475] In certain embodiments, an oligomeric compound complementary to any one of SEQ ID NOs: 1-10 and 14 is capable of reducing the amount of GYS1 RNA in vitro by at least 10%, at least 20%, at least 30%, at least 40%, at least 50%, at least 60%, at least 70%, at least 80%, or at least 90% when administered according to the standard in vitro assay. In certain embodiments, an oligomeric compound complementary to any one of SEQ ID NOs: 1-10 and 14 is capable of reducing the amount of GYS1 RNA in vivo by at least 10%, at least 20%, at least 30%, at least 40%, at least 50%, at least 60%, at least 70%, at least 80%, or at least 90% when administered according to the standard in vivo assay. In certain embodiments, an oligomeric compound complementary to any one of SEQ ID NOs: 1-10 and 14 is capable of reducing the amount of GYS1 protein in vitro by at least 10%, at least 20%, at least 30%, at least 40%, at least 50%, at least 60%, at least 70%, at least 80%, or at least 90% when administered according to the standard in vitro assay. In certain embodiments, an oligomeric compound complementary to any one of SEQ ID NOs: 1-10 and 14 is capable of reducing the amount of GYS1 protein in vivo by at least 10%, at least 20%, at least 30%, at least 40%, at least 50%, at least 60%, at least 70%, at least 80%, or at least 90% when administered according to the standard in vivo assay. In certain embodiments, an oligomeric compound complementary to any one of SEQ ID NOs: 1-10 and 14 is capable of reducing the amount of GYS1 in the CSF of a subject by at least 10%, at least 20%, at least 30%, at least 40%, at least 50%, at least 60%, at least 70%, at least 80%, or at least 90%. In certain embodiments, an oligomeric compound complementary to any one of SEQ ID NOs: 1-10 and 14 is capable of reducing the amount of GYS1 protein in the CSF of a subject by at least 10%, at least 20%, at least 30%, at least 40%, at least 50%, at least 60%, at least 70%, at least 80%, or at least 90%.

### C. Certain Target Nucleic Acids in Certain Tissues

[0476] In certain embodiments, oligomeric compounds comprise or consist of an oligonucleotide comprising a portion that is complementary to a target nucleic acid, wherein the target nucleic acid is expressed in a pharmacologically relevant tissue. In certain embodiments, the pharmacologically relevant tissues are the cells and tissues that comprise the central nervous system (CNS). Such tissues include the brain and spinal cord. In certain embodiments, the pharmacologically relevant tissues include white matter tracts, such tissues include the corpus callosum, cerebellum, striatum, hippocampus, and brainstem.

### V. Certain Methods and Uses

[0477] Certain embodiments provided herein relate to methods of reducing or inhibiting GYS1 expression or activity, which can be useful for treating, preventing, or ameliorating a disease or disorder associated with GYS1. In certain embodiments, the disease or disorder associated with GYS1 is a neurogenerative disease characterized by an accumulation of aberrant glycogen, an accumulation of polyglucosan bodies, and/or an accumulation of Lafora bodies. In certain embodiments, the disease or disorder associated with GYS1 is a glycogen storage disease. In certain embodiments, the glycogen storage disease is Lafora disease, adult polyglucosan body disease (APBD), Andersen's disease, or Pompe disease. In certain embodiments, the glycogen storage disease is Lafora disease.

[0478] In certain embodiments, a method comprises administering to a subject an oligomeric compound, a modified oligonucleotide, an oligomeric duplex, or an antisense agent, any of which having a nucleobase sequence complementary to a GYS1 nucleic acid. In certain embodiments, the subject has or is at risk for developing a disease or disorder associated with GYS1. In certain embodiments, the subject has a glycogen storage disease. In certain embodiments, the subject has a neurogenerative disease characterized by an accumulation of aberrant glycogen, an accumulation of polyglucosan bodies, and/or an accumulation of Lafora bodies. In certain embodiments, the subject has Lafora disease. In certain embodiments, the subject has adult polyglucosan body disease (APBD). In certain embodiments, the subject has Andersen's disease. In certain embodiments, the subject has Pompe disease.

[0479] In certain embodiments, a method of treating a disease or disorder associated with GYS1 comprises administering to a subject an oligomeric compound, a modified oligonucleotide, an oligomeric duplex, or an antisense agent, any of which having a nucleobase sequence complementary to a GYS1 nucleic acid. In certain embodiments, the subject has or is at risk for developing a disease or disorder associated with GYS1. In certain embodiments, the subject has a neurogenerative disease characterized by an accumulation of aberrant glycogen, an accumulation of polyglucosan bodies, and/or an accumulation of Lafora bodies.

[0480] In certain embodiments, a method of treating a glycogen storage disease comprises administering to a subject an oligomeric compound, a modified oligonucleotide, an oligomeric duplex, or an antisense agent, any of which having a nucleobase sequence complementary to a GYS1 nucleic acid. In certain embodiments, the subject has Lafora disease. In certain embodiments, the subject has adult polyglucosan body disease (APBD). In certain embodiments, the subject has Andersen's disease. In certain embodiments, the subject has Pompe disease. In certain embodiments, at least one symptom or hallmark of the glycogen storage disease is ameliorated. In certain embodiments, the at least one symptom or hallmark is seizures, cognitive deterioration, neuromuscular weakness, myoclonus, dementia, ataxia, cerebellar dysfunction, impaired speech, loss of ambulation, swallowing difficulty, or epileptic episode. In certain embodiments, administration of the oligomeric compound, the modified oligonucleotide, the oligomeric duplex, or the antisense agent to the subject reduces or delays the onset or progression of seizures, neuromuscular weakness, myoclonus, dementia, ataxia, cerebellar dysfunction, impaired speech, a loss of ambulation, swallowing difficulty, or epileptic episode, or slows cognitive deterioration in the subject.

[0481] In certain embodiments, a method of reducing expression of GYS1 nucleic acid, for example RNA, or reducing expression of GYS1 protein in a cell comprises contacting the cell with an oligomeric compound, a modified oligonucleotide, an oligomeric duplex, or an antisense agent, any of which having a nucleobase sequence complementary to a GYS1 nucleic acid. In certain embodiments, the subject has or is at risk for developing a disease or disorder associated with GYS1. In certain embodiments, the subject has or is at risk for developing a glycogen storage disease. In certain embodiments, the cell is a neuron. In certain embodiments, the cell is a human cell.

[0482] Certain embodiments are drawn to an oligomeric compound, a modified oligonucleotide, an oligomeric duplex, or an antisense agent, any of which having a nucleobase sequence complementary to a GYS1 nucleic acid, for use in treating a disease or disorder associated with GYS1 or for use in the manufacture of a medicament for treating a disease or disorder associated with GYS1. In certain embodiments, the disease or disorder associated with GYS1 is a neurogenerative disease characterized by an accumulation of aberrant glycogen, an accumulation of polyglucosan bodies, and/or an accumulation of Lafora bodies.

[0483] Certain embodiments are drawn to an oligomeric compound, a modified oligonucleotide, an oligomeric duplex, or an antisense agent, any of which having a nucleobase sequence complementary to a GYS1 nucleic acid, for use in treating a glycogen storage disease or for use in the manufacture of a medicament for treating a glycogen storage disease. In certain embodiments, the glycogen storage disease is Lafora disease, adult polyglucosan body disease (APBD), Andersen's disease, or Pompe disease. In certain embodiments, the glycogen storage disease is Lafora disease.

[0484] In any of the methods or uses described herein, the oligomeric compound, the modified oligonucleotide, the oligomeric duplex, or the antisense agent can be any described herein.

### VI. Certain Pharmaceutical Compositions

[0485] In certain embodiments, described herein are pharmaceutical compositions comprising one or more oligomeric compounds. In certain embodiments, the one or more oligomeric compounds each consists of a modified oligonucleotide. In certain embodiments, the pharmaceutical composition comprises a pharmaceutically acceptable diluent or carrier. In certain embodiments, a pharmaceutical composition comprises or consists of a sterile saline solution and one or more oligomeric compound. In certain embodiments, the sterile saline is pharmaceutical grade saline. In certain embodiments, a pharmaceutical composition comprises or consists of one or more oligomeric compound and sterile water. In certain embodiments, the sterile water is pharmaceutical grade water. In certain embodiments, a pharmaceutical composition comprises or consists of one or more oligomeric compound and phosphate-buffered saline (PBS). In certain embodiments, the sterile PBS is pharmaceutical grade PBS. In certain embodiments, a pharmaceutical composition comprises or consists of one or more oligomeric compound and artificial cerebrospinal fluid (“artificial CSF” or “aCSF”). In certain embodiments, the artificial cerebrospinal fluid is pharmaceutical grade.

[0486] In certain embodiments, a pharmaceutical composition comprises a modified oligonucleotide and artificial cerebrospinal fluid (aCSF). In certain embodiments, a pharmaceutical composition consists of a modified oligonucleotide and artificial cerebrospinal fluid. In certain embodiments, a pharmaceutical composition consists essentially of a modified oligonucleotide and artificial cerebrospinal fluid. In certain embodiments, the artificial cerebrospinal fluid is pharmaceutical grade.

[0487] In certain embodiments, aCSF comprises sodium chloride, potassium chloride, sodium dihydrogen phosphate dihydrate, sodium phosphate dibasic anhydrous, calcium chloride dihydrate, and magnesium chloride hexahydrate. In certain embodiments, the pH of an aCSF solution is modulated with a suitable pH-adjusting agent, for example, with acids such as hydrochloric acid and alkalis such as sodium hydroxide, to a range of from about 7.1-7.3, or to about 7.2.

[0488] In certain embodiments, pharmaceutical compositions comprise one or more oligomeric compound and one or more excipients. In certain embodiments, excipients are selected from water, salt solutions, alcohol, polyethylene glycols, gelatin, lactose, amylase, magnesium stearate, talc, silicic acid, viscous paraffin, hydroxymethylcellulose and polyvinylpyrrolidone.

[0489] In certain embodiments, oligomeric compounds may be admixed with pharmaceutically acceptable active and/or inert substances for the preparation of pharmaceutical compositions or formulations. Compositions and methods for the formulation of pharmaceutical compositions depend on a number of criteria, including, but not limited to, route of administration, extent of disease, or dose to be administered.

[0490] In certain embodiments, pharmaceutical compositions comprising an oligomeric compound encompass any pharmaceutically acceptable salts of the oligomeric compound, esters of the oligomeric compound, or salts of such esters. In certain embodiments, pharmaceutical compositions comprising oligomeric compounds comprising one or more oligonucleotide, upon administration to a subject, including a human, are capable of providing (directly or indirectly) the biologically active metabolite or residue thereof. Accordingly, for example, the disclosure is also drawn to pharmaceutically acceptable salts of oligomeric compounds, prodrugs, pharmaceutically acceptable salts of such prodrugs, and other bioequivalents. In certain embodiments, pharmaceutically acceptable salts comprise inorganic salts, such as monovalent or divalent inorganic salts. Suitable pharmaceutically acceptable salts include, but are not limited to, sodium, potassium, calcium, and magnesium salts. In certain embodiments, prodrugs comprise one or more conjugate group attached to an oligonucleotide, wherein the conjugate group is cleaved by endogenous nucleases within the body.

[0491] In certain embodiments, oligomeric compounds are lyophilized and isolated as sodium salts. In certain embodiments, the sodium salt of an oligomeric compound is mixed with a pharmaceutically acceptable diluent. In certain embodiments, the pharmaceutically acceptable diluent comprises sterile saline, sterile water, PBS, or aCSF. In certain embodiments, the sodium salt of an oligomeric compound is mixed with PBS. In certain embodiments, the sodium salt of an oligomeric compound is mixed with aCSF.

[0492] Lipid moieties have been used in nucleic acid therapies in a variety of methods. In certain such methods, the nucleic acid, such as an oligomeric compound, is introduced into preformed liposomes or lipoplexes made of mixtures of cationic lipids and neutral lipids. In certain methods, DNA complexes with mono- or poly-cationic lipids are formed without the presence of a neutral lipid. In certain embodiments, a lipid moiety is selected to increase distribution of a pharmaceutical agent to a particular cell or tissue. In certain embodiments, a lipid moiety is selected to increase distribution of a pharmaceutical agent to fat tissue. In certain embodiments, a lipid moiety is selected to increase distribution of a pharmaceutical agent to muscle tissue.

[0493] In certain embodiments, pharmaceutical compositions comprise a delivery system. Examples of delivery systems include, but are not limited to, liposomes and emulsions. Certain delivery systems are useful for preparing certain pharmaceutical compositions including those comprising hydrophobic compounds. In certain embodiments, certain organic solvents such as dimethylsulfoxide are used.

[0494] In certain embodiments, pharmaceutical compositions comprise one or more tissue-specific delivery molecules designed to deliver the one or more pharmaceutical agents comprising an oligomeric compound provided herein to specific tissues or cell types. For example, in certain embodiments, pharmaceutical compositions include liposomes coated with a tissue-specific antibody.

[0495] In certain embodiments, pharmaceutical compositions comprise a co-solvent system. Certain of such co-solvent systems comprise, for example, benzyl alcohol, a nonpolar surfactant, a water-miscible organic polymer, and an aqueous phase. In certain embodiments, such co-solvent systems are used for hydrophobic compounds. A non-limiting example of such a co-solvent system is the VPD co-solvent system, which is a solution of absolute ethanol comprising 3% w/v benzyl alcohol, 8% w/v of the nonpolar surfactant Polysorbate 80™ and 65% w/v polyethylene glycol 300. The proportions of such co-solvent systems may be varied considerably without significantly altering their solubility and toxicity characteristics. Furthermore, the identity of co-solvent components may be varied: for example, other surfactants may be used instead of Polysorbate 80™; the fraction size of polyethylene glycol may be varied; other biocompatible polymers may replace polyethylene glycol, e.g., polyvinyl pyrrolidone; and other sugars or polysaccharides may substitute for dextrose.

[0496] In certain embodiments, pharmaceutical compositions are prepared for oral administration. In certain embodiments, pharmaceutical compositions are prepared for buccal administration. In certain embodiments, a pharmaceutical composition is prepared for administration by injection (e.g., intravenous, subcutaneous, intramuscular, intrathecal (IT), intracerebroventricular (ICV), etc.). In certain of such embodiments, a pharmaceutical composition comprises a carrier and is formulated in aqueous solution, such as water or physiologically compatible buffers such as Hanks's solution, Ringer's solution, or physiological saline buffer. In certain embodiments, other ingredients are included (e.g., ingredients that aid in solubility or serve as preservatives). In certain embodiments, injectable suspensions are prepared using appropriate liquid carriers, suspending agents and the like. Certain pharmaceutical compositions for injection are presented in unit dosage form, e.g., in ampoules or in multi-dose containers. Certain pharmaceutical compositions for injection are suspensions, solutions or emulsions in oily or aqueous vehicles, and may contain formulatory agents such as suspending, stabilizing and/or dispersing agents. Certain solvents suitable for use in pharmaceutical compositions for injection include, but are not limited to, lipophilic solvents and fatty oils, such as sesame oil, synthetic fatty acid esters, such as ethyl oleate or triglycerides, and liposomes.

[0497] Under certain conditions, certain compounds disclosed herein act as acids. Although such compounds may be drawn or described in protonated (free acid) form, or ionized and in association with a cation (salt) form, aqueous solutions of such compounds exist in equilibrium among such forms. For example, a phosphodiester linkage of an oligonucleotide in aqueous solution exists in equilibrium among free acid, anion and salt forms. Unless otherwise indicated, compounds described herein are intended to include all such forms. Moreover, certain oligonucleotides have several such linkages, each of which is in equilibrium. Thus, oligonucleotides in solution exist in an ensemble of forms at multiple positions all at equilibrium. The term “oligonucleotide” is intended to include all such forms. Drawn structures necessarily depict a single form. Nevertheless, unless otherwise indicated, such drawings are likewise intended to include corresponding forms. Herein, a structure depicting the free acid of a compound followed by the term “or a pharmaceutically acceptable salt thereof” expressly includes all such forms that may be fully or partially protonated/de-protonated/in association with a cation or a combination of cations. In certain embodiments, one or more specific cation is identified. The cations include, but are not limited to, sodium, potassium, calcium, and magnesium. In certain embodiments, a structure depicting the free acid of a compound followed by the term “or a pharmaceutically acceptable salt thereof” expressly includes all such forms that may be fully or partially protonated/de-protonated/in association with one or more cations selected from sodium, potassium, calcium, and magnesium.

[0498] In certain embodiments, modified oligonucleotides or oligomeric compounds are in aqueous solution with sodium. In certain embodiments, modified oligonucleotides or oligomeric compounds are in aqueous solution with potassium. In certain embodiments, modified oligonucleotides or oligomeric compounds are in PBS. In certain embodiments, modified oligonucleotides or oligomeric compounds are in water. In certain such embodiments, the pH of the solution is adjusted with NaOH and/or HCl to achieve a desired pH.

[0499] Herein, certain specific doses are described. A dose may be in the form of a dosage unit. For clarity, a dose (or dosage unit) of a modified oligonucleotide or an oligomeric compound in milligrams indicates the mass of the free acid form of the modified oligonucleotide or oligomeric compound. As described above, in aqueous solution, the free acid is in equilibrium with anionic and salt forms. However, for the purpose of calculating dose, it is assumed that the modified oligonucleotide or oligomeric compound exists as a solvent-free, sodium-acetate free, anhydrous, free acid.

[0500] In certain embodiments, where a modified oligonucleotide or an oligomeric compound is in solution comprising sodium (e.g., saline), the modified oligonucleotide or oligomeric compound may be partially or fully de-protonated and in association with sodium ions. However, the mass of the protons is nevertheless counted toward the weight of the dose, and the mass of the sodium ions is not counted toward the weight of the dose. Thus, for example, a dose, or dosage unit, of 10 mg of Compound No. 1127954, equals the number of fully protonated molecules that weighs 10 mg. This would be equivalent to 10.47 mg of solvent-free, sodium acetate-free, anhydrous sodiated Compound No. 1127954.

[0501] In certain embodiments, where a modified oligonucleotide or oligomeric compound is in a solution, such as aCSF, comprising sodium, potassium, calcium, and magnesium, the modified oligonucleotide or oligomeric compound may be partially or fully de-protonated and in association with sodium, potassium, calcium, and/or magnesium. However, the mass of the protons is nevertheless counted toward the weight of the dose, and the mass of the sodium, potassium, calcium, and magnesium ions is not counted toward the weight of the dose.

[0502] In certain embodiments, when an oligomeric compound comprises a conjugate group, the mass of the conjugate group may be included in calculating the dose of such oligomeric compound. If the conjugate group also has an acid, the conjugate group is likewise assumed to be fully protonated for the purpose of calculating dose.

### VII. Certain Compositions

### 1. Compound No. 1127954

[0503] In certain embodiments, Compound No. 1127954 is characterized as a 5-10-5 MOE gapmer having a nucleobase sequence (from 5′ to 3′) of CCGTCTACAGGATTTTCTAG (SEQ ID NO: 83), wherein each of nucleosides 1-5 and 16-20 (from 5′ to 3′) are 2′-O(CH₂)₂OCH₃ nucleosides and each of nucleosides 6-15 are 2′-β-D-deoxynucleosides, wherein the internucleoside linkages between nucleosides 2 to 3, 3 to 4, 4 to 5, 16 to 17, and 17 to 18 are phosphodiester internucleoside linkages, the internucleoside linkages between nucleosides 1 to 2, 5 to 6, 6 to 7, 7 to 8, 8 to 9, 9 to 10, 10 to 11, 11 to 12, 12 to 13, 13 to 14, 14 to 15, 15 to 16, 18 to 19, and 19 to 20 are phosphorothioate internucleoside linkages, and wherein each cytosine is a 5-methylcytosine.

[0504] In certain embodiments, Compound No. 1127954 is represented by the following chemical notation: ^{m}Cₑₛ^{m}CₑₒGₑₒTₑₒ^{m}CₑₛT_{ds}A_{ds}^{m}C_{ds}A_{ds}G_{ds}G_{ds}A_{ds}T_{ds}T_{ds}T_{ds}Tₑₒ^{m}CₑₒTₑₛAₑₛGₑ (SEQ ID NO: 83), wherein:
[0505] A=an adenine nucleobase,
[0506] ^{m}C=a 5-methylcytosine nucleobase,
[0507] G=a guanine nucleobase,
[0508] T=a thymine nucleobase,
[0509] e=a 2′-O(CH₂)₂OCH₃ ribosyl sugar moiety,
[0510] d=a 2′-β-D-deoxyribosyl sugar moiety,
[0511] s=a phosphorothioate internucleoside linkage, and
[0512] o=a phosphodiester internucleoside linkage.

[0513] In certain embodiments, Compound No. 1127954 is represented by the following chemical structure:

[chemical structure]

or a pharmaceutically acceptable salt thereof. In certain embodiments, the pharmaceutically acceptable salt of Compound No. 1127954 comprises one or more cations selected from sodium, potassium, calcium, and magnesium.

[0514] In certain embodiments, the sodium salt of Compound No. 1127954 is represented by the following chemical structure:

[chemical structure]

### 2. Compound No. 1127956

[0515] In certain embodiments, Compound No. 1127956 is characterized as a 5-10-5 MOE gapmer having a nucleobase sequence (from 5′ to 3′) of TTCCGTCTACAGGATTTTCT (SEQ ID NO: 1454), wherein each of nucleosides 1-5 and 16-20 (from 5′ to 3′) are 2′-O(CH₂)₂OCH₃ nucleosides and each of nucleosides 6-15 are 2′-β-D-deoxynucleosides, wherein the internucleoside linkages between nucleosides 2 to 3, 3 to 4, 4 to 5, 16 to 17, and 17 to 18 are phosphodiester internucleoside linkages, the internucleoside linkages between nucleosides 1 to 2, 5 to 6, 6 to 7, 7 to 8, 8 to 9, 9 to 10, 10 to 11, 11 to 12, 12 to 13, 13 to 14, 14 to 15, 15 to 16, 18 to 19, and 19 to 20 are phosphorothioate internucleoside linkages, and wherein each cytosine is a 5-methylcytosine.

[0516] In certain embodiments, Compound No. 1127956 is represented by the following chemical notation: TₑₛTₑₒ^{m}Cₑₒ^{m}CₑₒGₑₛT_{ds}^{m}C_{ds}T_{ds}A_{ds}^{m}C_{ds}A_{ds}G_{ds}G_{ds}A_{ds}T_{ds}TₑₒTₑₒTₑₛ^{m}CₑₛTₑ (SEQ ID NO: 1454), wherein:
[0517] A=an adenine nucleobase,
[0518] ^{m}C=a 5-methylcytosine nucleobase,
[0519] G=a guanine nucleobase,
[0520] T=a thymine nucleobase,
[0521] e=a 2′-O(CH₂)₂OCH₃ ribosyl sugar moiety,
[0522] d=a 2′-β-D-deoxyribosyl sugar moiety,
[0523] s=a phosphorothioate internucleoside linkage, and
[0524] o=a phosphodiester internucleoside linkage.

[0525] In certain embodiments, Compound No. 1127956 is represented by the following chemical structure:

[chemical structure]

or a pharmaceutically acceptable salt thereof. In certain embodiments, the pharmaceutically acceptable salt of Compound No. 1127956 comprises one or more cations selected from sodium, potassium, calcium, and magnesium.

[0526] In certain embodiments, the sodium salt of Compound No. 1127956 is represented by the following chemical structure:

[chemical structure]

### 3. Compound No. 1311856

[0527] In certain embodiments, Compound No. 1311856 is characterized as a 6-10-4 MOE gapmer having a nucleobase sequence (from 5′ to 3′) of TTCCGTCTACAGGATTTTCT (SEQ ID NO: 1454), wherein each of nucleosides 1-6 and 17-20 (from 5′ to 3′) are 2′-O(CH₂)₂OCH₃ nucleosides and each of nucleosides 7-16 are 2′-β-D-deoxynucleosides, wherein the internucleoside linkages between nucleosides 2 to 3, 3 to 4, 4 to 5, 5 to 6, 6 to 7, and 17 to 18 are phosphodiester internucleoside linkages, the internucleoside linkages between nucleosides 1 to 2, 7 to 8, 8 to 9, 9 to 10, 10 to 11, 11 to 12, 12 to 13, 13 to 14, 14 to 15, 15 to 16, 16 to 17, 18 to 19, and 19 to 20 are phosphorothioate internucleoside linkages, and wherein each cytosine is a 5-methylcytosine.

[0528] In certain embodiments, Compound No. 1311856 is represented by the following chemical notation: TₑₛTₑₒ^{m}Cₑₒ^{m}CₑₒGₑₒTₑₒ^{m}C_{ds}T_{ds}A_{ds}^{m}C_{ds}A_{ds}G_{ds}G_{ds}A_{ds}T_{ds}T_{ds}TₑₒTₑₛ^{m}CₑₛTₑ (SEQ ID NO: 1454), wherein:
[0529] A=an adenine nucleobase,
[0530] ^{m}C=a 5-methylcytosine nucleobase,
[0531] G=a guanine nucleobase,
[0532] T=a thymine nucleobase,
[0533] e=a 2′-O(CH₂)₂OCH₃ ribosyl sugar moiety,
[0534] d=a 2′-β-D-deoxyribosyl sugar moiety,
[0535] s=a phosphorothioate internucleoside linkage, and
[0536] o=a phosphodiester internucleoside linkage.

[0537] In certain embodiments, Compound No. 1311856 is represented by the following chemical structure:

[chemical structure]

or a pharmaceutically acceptable salt thereof. In certain embodiments, the pharmaceutically acceptable salt of Compound No. 1311856 comprises one or more cations selected from sodium, potassium, calcium, and magnesium.

[0538] In certain embodiments, the sodium salt of Compound No. 1311856 is represented by the following chemical structure:

[chemical structure]

### 4. Compound No. 1128013

[0539] In certain embodiments, Compound No. 1128013 is characterized as a 5-10-5 MOE gapmer having a nucleobase sequence (from 5′ to 3′) of GCACACAAGTAAAGCTAGCA (SEQ ID NO: 921), wherein each of nucleosides 1-5 and 16-20 (from 5′ to 3′) are 2′-O(CH₂)₂OCH₃ nucleosides and each of nucleosides 6-15 are 2′-β-D-deoxynucleosides, wherein the internucleoside linkages between nucleosides 2 to 3, 3 to 4, 4 to 5, 16 to 17, and 17 to 18 are phosphodiester internucleoside linkages, the internucleoside linkages between nucleosides 1 to 2, 5 to 6, 6 to 7, 7 to 8, 8 to 9, 9 to 10, 10 to 11, 11 to 12, 12 to 13, 13 to 14, 14 to 15, 15 to 16, 18 to 19, and 19 to 20 are phosphorothioate internucleoside linkages, and wherein each cytosine is a 5-methylcytosine.

[0540] In certain embodiments, Compound No. 1128013 is represented by the following chemical notation: Gₑₛ^{m}CₑₒAₑₒ^{m}CₑₒAₑₛ^{m}C_{ds}A_{ds}A_{ds}G_{ds}T_{ds}A_{ds}A_{ds}A_{ds}G_{ds}^{m}C_{ds}TₑₒAₑₒGₑₛ^{m}CₑₛAₑ (SEQ ID NO: 921), wherein:
[0541] A=an adenine nucleobase,
[0542] ^{m}C=a 5-methylcytosine nucleobase,
[0543] G=a guanine nucleobase,
[0544] T=a thymine nucleobase,
[0545] e=a 2′-O(CH₂)₂OCH₃ ribosyl sugar moiety,
[0546] d=a 2′-β-D-deoxyribosyl sugar moiety,
[0547] s=a phosphorothioate internucleoside linkage, and
[0548] o=a phosphodiester internucleoside linkage.

[0549] In certain embodiments, Compound No. 1128013 is represented by the following chemical structure:

[chemical structure]

or a pharmaceutically acceptable salt thereof. In certain embodiments, the pharmaceutically acceptable salt of Compound No. 1128013 comprises one or more cations selected from sodium, potassium, calcium, and magnesium.

[0550] In certain embodiments, the sodium salt of Compound No. 1128013 is represented by the following chemical structure:

[chemical structure]

### VIII. Certain Hotspot Regions

[0551] In certain embodiments, nucleobases in the ranges specified below comprise a hotspot region of a GYS1 nucleic acid. In certain embodiments, modified oligonucleotides that are complementary to a hotspot region of GYS1 nucleic acid achieve an average of more than 50% reduction of GYS1 RNA in vitro in the standard cell assay. In certain embodiments, modified oligonucleotides that are complementary to a hotspot region of GYS1 nucleic acid achieve an average of 50% or greater reduction of GYS1 RNA in vivo in the standard in vivo assay.

### 1. Nucleobases 3341-3385 of SEQ ID NO: 1

[0552] In certain embodiments, nucleobases 3341-3385 of SEQ ID NO: 1 comprise a hotspot region. In certain embodiments, modified oligonucleotides are complementary to a portion of nucleobases 3341-3385 of SEQ ID NO: 1. In certain embodiments, modified oligonucleotides are 20 nucleobases in length. In certain embodiments, modified oligonucleotides are gapmers. In certain embodiments, the gapmers are MOE gapmers. In certain embodiments, all of the internucleoside linkages of the modified oligonucleotides are phosphorothioate internucleoside linkages. In certain embodiments, the internucleoside linkages of the modified oligonucleotides are phosphorothioate internucleoside linkages and phosphodiester internucleoside linkages.

[0553] The nucleobase sequences of SEQ ID NOs: 1194, 1270, 1347, 446, 1424, 1497, 1574, and 1651 are complementary to a portion of nucleobases 3341-3385 of SEQ ID NO: 1.

[0554] The nucleobase sequences of Compound Nos.: 1126896, 1126897, 1126898, 941588, 1126899, 1126900, 1126901, and 1126902 are complementary to a portion of nucleobases 3341-3385 of SEQ ID NO: 1.

[0555] In certain embodiments, modified oligonucleotides complementary to a portion of nucleobases 3341-3385 of SEQ ID NO: 1 achieve at least 62% reduction of GYS1 RNA in the standard in vitro assay.

[0556] In certain embodiments, modified oligonucleotides complementary to a portion of nucleobases 3341-3385 of SEQ ID NO: 1 achieve an average of 81.8% reduction of GYS1 RNA in the standard in vitro assay.

### 2. Nucleobases 3565-3591 of SEQ ID NO: 1

[0557] In certain embodiments, nucleobases 3565-3591 of SEQ ID NO: 1 comprise a hotspot region. In certain embodiments, modified oligonucleotides are complementary to a portion of nucleobases 3565-3591 of SEQ ID NO: 1. In certain embodiments, modified oligonucleotides are 20 nucleobases in length. In certain embodiments, modified oligonucleotides are gapmers. In certain embodiments, the gapmers are MOE gapmers. In certain embodiments, all of the internucleoside linkages of the modified oligonucleotides are phosphorothioate internucleoside linkages.

[0558] The nucleobase sequences of SEQ ID NOs: 140, 1348, 217, 1498, and 1575 are complementary to a portion of nucleobases 3565-3591 of SEQ ID NO: 1.

[0559] The nucleobase sequences of Compound Nos.: 941596, 1126930, 941597, 1126931, 1126932, and 1126933 are complementary to a portion of nucleobases 3565-3591 of SEQ ID NO: 1.

[0560] In certain embodiments, modified oligonucleotides complementary to a portion of nucleobases 3565-3591 of SEQ ID NO: 1 achieve at least 70% reduction of GYS1 RNA in the standard in vitro assay.

[0561] In certain embodiments, modified oligonucleotides complementary to a portion of nucleobases 3565-3591 of SEQ ID NO: 1 achieve an average of 79.5% reduction of GYS1 RNA in the standard in vitro assay.

### 3. Nucleobases 5914-5948 of SEQ ID NO: 2

[0562] In certain embodiments, nucleobases 5914-5948 of SEQ ID NO: 2 comprise a hotspot region. In certain embodiments, modified oligonucleotides are complementary to a portion of nucleobases 5914-5948 of SEQ ID NO: 2. In certain embodiments, modified oligonucleotides are 20 nucleobases in length. In certain embodiments, modified oligonucleotides are gapmers. In certain embodiments, the gapmers are MOE gapmers. In certain embodiments, all of the internucleoside linkages of the modified oligonucleotides are phosphorothioate internucleoside linkages. In certain embodiments, the internucleoside linkages of the modified oligonucleotides are phosphorothioate internucleoside linkages and phosphodiester internucleoside linkages. In certain embodiments, the phosphodiester (“o”) and phosphorothioate (“s”) internucleoside linkages are arranged in the order from 5′ to 3′: sooosssssssssssooss, wherein each “s” represents a phosphorothioate internucleoside linkage and each “o” represents a phosphodiester internucleoside linkage.

[0563] The nucleobase sequences of SEQ ID NOs: 2508, 2585, 2661, 2737, 2814, 2891, 517, and 594 are complementary to a portion of nucleobases 5914-5948 of SEQ ID NO: 2.

[0564] The nucleobase sequences of Compound Nos.: 1127329, 1127330, 1127331, 1127332, 1127333, 1127334, 1127335, and 1127336 are complementary to a portion of nucleobases 5914-5948 of SEQ ID NO: 2.

[0565] In certain embodiments, modified oligonucleotides complementary to a portion of nucleobases 5914-5948 of SEQ ID NO: 2 achieve at least 60% reduction of GYS1 RNA in the standard in vitro assay. In certain embodiments, modified oligonucleotides complementary to a portion of nucleobases 5914-5948 of SEQ ID NO: 2 achieve an average of 76.8% reduction of GYS1 RNA in the standard in vitro assay.

### 4. Nucleobases 7803-7844 of SEQ ID NO: 2

[0566] In certain embodiments, nucleobases 7803-7844 of SEQ ID NO: 2 comprise a hotspot region. In certain embodiments, modified oligonucleotides are complementary to a portion of nucleobases 7803-7844 of SEQ ID NO: 2. In certain embodiments, modified oligonucleotides are 20 nucleobases in length. In certain embodiments, modified oligonucleotides are gapmers. In certain embodiments, the gapmers are MOE gapmers. In certain embodiments, all of the internucleoside linkages of the modified oligonucleotides are phosphorothioate internucleoside linkages. In certain embodiments, the internucleoside linkages of the modified oligonucleotides are phosphorothioate internucleoside linkages and phosphodiester internucleoside linkages. In certain embodiments, the phosphodiester (“o”) and phosphorothioate (“s”) internucleoside linkages are arranged in the order from 5′ to 3′: sooosssssssssssooss, wherein each “s” represents a phosphorothioate internucleoside linkage and each “o” represents a phosphodiester internucleoside linkage.

[0567] The nucleobase sequences of SEQ ID NOs: 1513, 1590, 1667, and 1744 are complementary to a portion of nucleobases 7803-7844 of SEQ ID NO: 2.

[0568] The nucleobase sequences of Compound Nos.: 1127412, 1127413, 1127414, and 1127415 are complementary to a portion of nucleobases 7803-7844 of SEQ ID NO: 2.

[0569] In certain embodiments, modified oligonucleotides complementary to a portion of nucleobases 7803-7844 of SEQ ID NO: 2 achieve at least 74% reduction of GYS1 RNA in the standard in vitro assay.

[0570] In certain embodiments, modified oligonucleotides complementary to a portion of nucleobases 7803-7844 of SEQ ID NO: 2 achieve an average of 81.8% reduction of GYS1 RNA in the standard in vitro assay.

### 5. Nucleobases 12350-12385 of SEQ ID NO: 2

[0571] In certain embodiments, nucleobases 12350-12385 of SEQ ID NO: 2 comprise a hotspot region. In certain embodiments, modified oligonucleotides are complementary to a portion of nucleobases 12350-12385 of SEQ ID NO: 2. In certain embodiments, modified oligonucleotides are 20 nucleobases in length. In certain embodiments, modified oligonucleotides are gapmers. In certain embodiments, the gapmers are MOE gapmers. In certain embodiments, all of the internucleoside linkages of the modified oligonucleotides are phosphorothioate internucleoside linkages. In certain embodiments, the internucleoside linkages of the modified oligonucleotides are phosphorothioate internucleoside linkages and phosphodiester internucleoside linkages. In certain embodiments, the phosphodiester (“o”) and phosphorothioate (“s”) internucleoside linkages are arranged in the order from 5′ to 3′: sooosssssssssssooss, wherein each “s” represents a phosphorothioate internucleoside linkage and each “o” represents a phosphodiester internucleoside linkage.

[0572] The nucleobase sequences of SEQ ID NOs: 914, 991, 1068, 1145, and 1222 are complementary to a portion of nucleobases 12350-12385 of SEQ ID NO: 2.

[0573] The nucleobase sequences of Compound Nos.: 1127788, 1127789, 1127790, 1127791, and 1127792 are complementary to a portion of nucleobases 12350-12385 of SEQ ID NO: 2.

[0574] In certain embodiments, modified oligonucleotides complementary to a portion of nucleobases 12350-12385 of SEQ ID NO: 2 achieve at least 65% reduction of GYS1 RNA in the standard in vitro assay. In certain embodiments, modified oligonucleotides complementary to a portion of nucleobases 12350-12385 of SEQ ID NO: 2 achieve an average of 72.4% reduction of GYS1 RNA in the standard in vitro assay.

### 6. Nucleobases: 15653-15688 of SEQ ID NO: 2

[0575] In certain embodiments, nucleobases 15653-15688 of SEQ ID NO: 2 comprise a hotspot region. In certain embodiments, modified oligonucleotides are complementary to a portion of nucleobases 15653-15688 of SEQ ID NO: 2. In certain embodiments, modified oligonucleotides are 20 nucleobases in length. In certain embodiments, modified oligonucleotides are gapmers. In certain embodiments, the gapmers are MOE gapmers. In certain embodiments, all of the internucleoside linkages of the modified oligonucleotides are phosphorothioate internucleoside linkages. In certain embodiments, the internucleoside linkages of the modified oligonucleotides are phosphorothioate internucleoside linkages and phosphodiester internucleoside linkages.

[0576] The nucleobase sequences of SEQ ID NOs: 1303, 83, 1380, 1454, 2954, 2947, 1530, 1607, 1684, 1761, 1837, 2951, 2949, 2944, 2943, 1913, and 1990 are complementary to a portion of nucleobases 15653-15688 of SEQ ID NO: 2. The nucleobase sequences of SEQ ID NOs: 1303, 83, 1380, 1454, 1530, 1607, 1684, 1761, 1837, 1913, and 1990 are complementary to a portion of nucleobases 15653-15688 of SEQ ID NO: 2. The nucleobase sequences of SEQ ID NOs: 2954, 2947, 2951, 2949, 2944, and 2943 are complementary to a portion of nucleobases 15653-15688 of SEQ ID NO: 2.

[0577] The nucleobase sequences of Compound Nos.: 1127953, 941715, 1127954, 1311857, 1311858, 1127955, 1311856, 1127956, 1251622, 1251615, 1127957, 1127958, 1127959, 1127960, 1127961, 1251619, 1251617, 1251612, 1251611, 1127962, and 1127963 are complementary to a portion of nucleobases 15653-15688 of SEQ ID NO: 2. The nucleobase sequence of Compound Nos.: 1127953, 941715, 1127954, 1127955, 1127956, 1127957, 1127958, 1127959, 1127960, 1127961, 1127962, and 1127963 are complementary to a portion of nucleobases 15653-15688 of SEQ ID NO: 2. The nucleobase sequence of Compound Nos.: 1311857, 1311858, 1311856, 1251622, 1251615, 1251619, 1251617, 1251612, and 1251611 are complementary to a portion of nucleobases 15653-15688 of SEQ ID NO: 2.

[0578] In certain embodiments, modified oligonucleotides complementary to a portion of nucleobases 15653-15688 of SEQ ID NO: 2 achieve at least 30% reduction of GYS1 RNA in the standard in vitro assay. In certain embodiments, modified oligonucleotides complementary to a portion of nucleobases 15653-15688 of SEQ ID NO: 2 achieve an average of 77.7% reduction of GYS1 RNA in the standard in vitro assay.

### 7. Nucleobases: 15801-15845 of SEQ ID NO: 2

[0579] In certain embodiments, nucleobases 15801-15845 of SEQ ID NO: 2 comprise a hotspot region. In certain embodiments, modified oligonucleotides are complementary to a portion of nucleobases 15801-15845 of SEQ ID NO: 2. In certain embodiments, modified oligonucleotides are 20 nucleobases in length. In certain embodiments, modified oligonucleotides are gapmers. In certain embodiments, the gapmers are MOE gapmers. In certain embodiments, all of the internucleoside linkages of the modified oligonucleotides are phosphorothioate internucleoside linkages. In certain embodiments, the internucleoside linkages of the modified oligonucleotides are phosphorothioate internucleoside linkages and phosphodiester internucleoside linkages.

[0580] The nucleobase sequences of SEQ ID NOs: 314, 843, 920, 997, and 1074 are complementary to a portion of nucleobases 15801-15845 of SEQ ID NO: 2.

[0581] The nucleobase sequences of Compound Nos.: 941718, 1127979, 1127980, 1127981, 1127982, and 1127983 are complementary to a portion of nucleobases 15801-15845 of SEQ ID NO: 2.

[0582] In certain embodiments, modified oligonucleotides complementary to a portion of nucleobases 15801-15845 of SEQ ID NO: 2 achieve at least 88% reduction of GYS1 RNA in the standard in vitro assay. In certain embodiments, modified oligonucleotides complementary to a portion of nucleobases 15801-15845 of SEQ ID NO: 2 achieve an average of 93% reduction of GYS1 RNA in the standard in vitro assay.

### 8. Nucleobases: 16745-16800 of SEQ ID NO: 2

[0583] In certain embodiments, nucleobases 16745-16800 of SEQ ID NO: 2 comprise a hotspot region. In certain embodiments, modified oligonucleotides are complementary to a portion of nucleobases 16745-16800 of SEQ ID NO: 2. In certain embodiments, modified oligonucleotides are 20 nucleobases in length. In certain embodiments, modified oligonucleotides are gapmers. In certain embodiments, the gapmers are MOE gapmers. In certain embodiments, all of the internucleoside linkages of the modified oligonucleotides are phosphorothioate internucleoside linkages. In certain embodiments, the internucleoside linkages of the modified oligonucleotides are phosphorothioate internucleoside linkages and phosphodiester internucleoside linkages.

[0584] The nucleobase sequences of SEQ ID NOs: 2682, 2758, 2835, 2912, 538, 615, 691, 767, 844, 921, 998, 1075, 1152, 161, and 1305 are complementary to a portion of nucleobases 16745-16800 of SEQ ID NO: 2.

[0585] The nucleobase sequences of Compound Nos.: 1128004, 1128005, 1128006, 1128007, 1128008, 1128009, 1128010, 1128011, 1128012, 1128013, 1128014, 1128015, 1128016, 941722, 1128017, and 1128018 are complementary to a portion of nucleobases 16745-16800 of SEQ ID NO: 2.

[0586] In certain embodiments, modified oligonucleotides complementary to a portion of nucleobases 16745-16800 of SEQ ID NO: 2 achieve at least 25% reduction of GYS1 RNA in the standard in vitro assay. In certain embodiments, modified oligonucleotides complementary to a portion of nucleobases 16745-16800 of SEQ ID NO: 2 achieve an average of 68.5% reduction of GYS1 RNA in the standard in vitro assay.

### 9. Nucleobases: 16828-16864 of SEQ ID NO: 2

[0587] In certain embodiments, nucleobases 16828-16864 of SEQ ID NO: 2 comprise a hotspot region. In certain embodiments, modified oligonucleotides are complementary to a portion of nucleobases 16828-16864 of SEQ ID NO: 2. In certain embodiments, modified oligonucleotides are 20 nucleobases in length. In certain embodiments, modified oligonucleotides are gapmers. In certain embodiments, the gapmers are MOE gapmers. In certain embodiments, the gapmers are 5-10-5 MOE gapmers. In certain embodiments, all of the internucleoside linkages of the modified oligonucleotides are phosphorothioate internucleoside linkages. In certain embodiments, the internucleoside linkages of the modified oligonucleotides are phosphorothioate internucleoside linkages and phosphodiester internucleoside linkages. In certain embodiments, the phosphodiester (“o”) and phosphorothioate (“s”) internucleoside linkages are arranged in the order from 5′ to 3′: sooosssssssssssooss, wherein each “s” represents a phosphorothioate internucleoside linkage and each “o” represents a phosphodiester internucleoside linkage.

[0588] The nucleobase sequences of SEQ ID NOs: 1382, 1456, and 1532 are complementary to a portion of nucleobases 16828-16864 of SEQ ID NO: 2.

[0589] The nucleobase sequences of Compound Nos.: 1128019, 1128020, and 1128021 are complementary to a portion of nucleobases 16828-16864 of SEQ ID NO: 2.

[0590] In certain embodiments, modified oligonucleotides complementary to a portion of nucleobases 16828-16864 of SEQ ID NO: 2 achieve at least 71% reduction of GYS1 RNA in the standard in vitro assay. In certain embodiments, modified oligonucleotides complementary to a portion of nucleobases 16828-16864 of SEQ ID NO: 2 achieve an average of 84.7% reduction of GYS1 RNA in the standard in vitro assay.

### 10. Nucleobases: 16915-16947 of SEQ ID NO: 2

[0591] In certain embodiments, nucleobases 16915-16947 of SEQ ID NO: 2 comprise a hotspot region. In certain embodiments, modified oligonucleotides are complementary to a portion of nucleobases 16915-16947 of SEQ ID NO: 2. In certain embodiments, modified oligonucleotides are 20 nucleobases in length. In certain embodiments, modified oligonucleotides are gapmers. In certain embodiments, the gapmers are MOE gapmers. In certain embodiments, all of the internucleoside linkages of the modified oligonucleotides are phosphorothioate internucleoside linkages. In certain embodiments, the internucleoside linkages of the modified oligonucleotides are phosphorothioate internucleoside linkages and phosphodiester internucleoside linkages. In certain embodiments, the phosphodiester (“o”) and phosphorothioate (“s”) internucleoside linkages are arranged in the order from 5′ to 3′: sooosssssssssssooss, wherein each “s” represents a phosphorothioate internucleoside linkage and each “o” represents a phosphodiester internucleoside linkage.

[0592] The nucleobase sequences of SEQ ID NOs: 2376, 2453, 2530, 2607, 2683, 2759, 2836, 2913, 539, and 616 are complementary to a portion of nucleobases 16915-16947 of SEQ ID NO: 2.

[0593] The nucleobase sequences of Compound Nos.: 1128032, 1128033, 1128034, 1128035, 1128036, 1128037, 1128038, 1128039, 1128040, and 1128041 are complementary to a portion of nucleobases 16915-16947 of SEQ ID NO: 2.

[0594] In certain embodiments, modified oligonucleotides complementary to a portion of nucleobases 16915-16947 of SEQ ID NO: 2 achieve at least 67% reduction of GYS1 RNA in the standard in vitro assay. In certain embodiments, modified oligonucleotides complementary to a portion of nucleobases 16915-16947 of SEQ ID NO: 2 achieve an average of 82.9% reduction of GYS1 RNA in the standard in vitro assay.

### 11. Additional Hotspot Regions

[0595] In certain embodiments, the ranges described in the Table below comprise hotspot regions. Each hotspot region begins with the nucleobase of SEQ ID NO: 1 or 2 identified in the ‘Target SEQ ID NO” column. The target region starts at the nucleobase identified in the “Target Start Site” column and ends with the nucleobase identified in the “Target Stop Site” column. In certain embodiments, modified oligonucleotides are complementary within any of the hotspot regions 1-23, as defined in the table below. In certain embodiments, modified oligonucleotides are 20 nucleobases in length. In certain embodiments, modified oligonucleotides are gapmers. In certain embodiments, the gapmers are MOE gapmers. In certain embodiments, all of the internucleoside linkages of the modified oligonucleotides are phosphorothioate internucleoside linkages. In certain embodiments, the internucleoside linkages of the modified oligonucleotides are phosphorothioate internucleoside linkages and phosphodiester internucleoside linkages. In certain embodiments, the phosphodiester (“o”) and phosphorothioate (“s”) internucleoside linkages are arranged in the order from 5′ to 3′: sooosssssssssssooss, wherein each “s” represents a phosphorothioate internucleoside linkage and each “o” represents a phosphodiester internucleoside linkage.

[0596] The nucleobase sequence of compounds listed in the “Compound No. in range” column in the table below are complementary to SEQ ID NO: 1 or 2 within the specified hotspot region. The nucleobase sequence of the oligonucleotides listed in the “SEQ ID NO: in range” column in the table below are complementary to the target sequence, SEQ ID NO: 1 or 2, within the specified hotspot region.

[0597] In certain embodiments, modified oligonucleotides complementary to nucleobases within the hotspot region achieve at least “Min. % Red. in vitro” (minimum % reduction, relative to untreated control cells) of GYS1 RNA in vitro in the standard cell assay, as indicated in the table below. In certain embodiments, modified oligonucleotides complementary to nucleobases within the hotspot region achieve an average of “Avg. % Red. in vitro” (average % reduction, relative to untreated control cells) of GYS1 RNA in vitro in the standard cell assay, as indicated in the table below.

TABLE 1
GYS1 Hotspots

| | Target | Target | Target | Min. % | Avg. % | | |
|---|---|---|---|---|---|---|---|
| Hotspot | SEQ | Start | Stop | Red. in | Red. in | | SEQ ID NOs in |
| ID | ID NO | Site | Site | vitro | vitro | Compound No. in Range | Range |
| 1 | 1 | 244 | 271 | 46 | 63 | 941367, 1126323, | 102, 1406, 1479, |
| | | | | | | 1126324, 1126325, | 1556, 1633, |
| | | | | | | 1126326, 1126327, | 1710, 1787, |
| | | | | | | 1126328, 1126329, and | 1863, and 179 |
| | | | | | | 941368 | |
| 2 | 1 | 289 | 317 | 48 | 62 | 1311870, 941369, | 256, 1939, 2015, |
| | | | | | | 1126330, 648138, | 2092, 2169, 333, |
| | | | | | | 1311878, 1311840, | and 2246 |
| | | | | | | 1126331, 1311872, | |
| | | | | | | 1126332, 1311877, | |
| | | | | | | 1126333, 1311841, | |
| | | | | | | 941370, and 1126334 | |
| 3 | 1 | 391 | 434 | 46 | 60 | 1126347, 941378, | 792, 26, 869, |
| | | | | | | 1126348, 1126349, | 946, 1023, 104, |
| | | | | | | 1126350, 941379, and | and 1100 |
| | | | | | | 1126351 | |
| 4 | 1 | 1191 | 1230 | 53 | 66 | 941437, 1126480, 941438, | 344, 1181, 421, |
| | | | | | | 1126481, 941439, and | 1257, 37, and |
| | | | | | | 1126482 | 1334 |
| 5 | 1 | 2633 | 2686 | 50 | 76 | 1126775, 941553, | 1724, 56, 1877, |
| | | | | | | 1126776, 1126777, | 1953, 2029, |
| | | | | | | 1126778, 1126779, | 2106, 2183, |
| | | | | | | 1126780, 1126781, | 2260, 2337, |
| | | | | | | 1126782, 1126783, | 2414, 133, and |
| | | | | | | 1126784, 941554, and | 2491 |
| | | | | | | 1126785 | |
| 6 | 1 | 2727 | 2764 | 44 | 65 | 1126788, 1126789, | 2721, 2797, |
| | | | | | | 1126790, 941555, | 2874, 210, 500, |
| | | | | | | 1126791, 1126792, | 577, 654, 730, |
| | | | | | | 1126793, 1126794, | 806, 883, 960, |
| | | | | | | 1126795, 1126796, | 287, 364, 1037, |
| | | | | | | 1126797, 941556, 941557, | 1114, 1191, and |
| | | | | | | 1126798, 1126799, | 1267 |
| | | | | | | 1126800, and 1126801 | |
| 7 | 1 | 2809 | 2851 | 42 | 70 | 1126802, 1126803, | 1344, 1421, |
| | | | | | | 1126804, 1126805, | 1494, 1571, |
| | | | | | | 1126806, and 941558 | 1648, and 441 |
| 8 | 1 | 3277 | 3326 | 54 | 74 | 1126884, 1126885, | 2723, 2800, |
| | | | | | | 1126886, 1126887, | 2877, 503, 61, |
| | | | | | | 941583, 1126888, | 580, 657, 138, |
| | | | | | | 1126889, 941584, and | and 733 |
| | | | | | | 1126890 | |
| 9 | 2 | 3239 | 3298 | 55 | 78 | 1126993, 1126994, | 1273, 1350, |
| | | | | | | 1126995, 1126996, | 1426, 1500, |
| | | | | | | 1126997, 1311846, | 1577, 1654, |
| | | | | | | 1126998, 1126999, | 1731, 1807, 372, |
| | | | | | | 1127000, 941605, | and 1960 |
| | | | | | | 1127001, and 1127002 | |
| 10 | 2 | 3324 | 3389 | 16 | 64 | 1311874, 1127009, | 2498, 2575, |
| | | | | | | 1127010, 1127011, | 2652, 2727, |
| | | | | | | 1127012, 1127013, | 2804, 2881, 507, |
| | | | | | | 1127014, 1127015, | 584, 661, 737, |
| | | | | | | 1127016, 1127017, | 813, 890, 967, |
| | | | | | | 1127018, 1127019, | 1044, 1121, 65, |
| | | | | | | 1127020, 1127021, | 1198, 1274, |
| | | | | | | 1127022, 1127023, | 1351, 1427, |
| | | | | | | 941607, 1127024, | 1501, 1578, |
| | | | | | | 1127025, 1127026, | 1655, 1732, |
| | | | | | | 1127027, 1127028, | 1808, 1884, |
| | | | | | | 1127029, 1127030, | 1961, 2037, |
| | | | | | | 1127031, 1127032, | 2114, 2191, |
| | | | | | | 1127033, 1127034, | 2268, 2345, |
| | | | | | | 1127035, 1127036, | 2422, 2499, and |
| | | | | | | 1127037, 1127038, | 2576 |
| | | | | | | 1127039, 1127040, | |
| | | | | | | 1127041, and 1127042 | |
| 11 | 2 | 3576 | 3612 | 49 | 73 | 1127090, 941611, | 1353, 373, 1503, |
| | | | | | | 1127091, 1127092, | 1580, 1657, |
| | | | | | | 1127093, 1127094, | 1734, 1810, |
| | | | | | | 1127095, 1127096, | 1886, 1963, |
| | | | | | | 1127097, 1127098, | 2039, 2116, |
| | | | | | | 1127099, 1127100, | 2193, 2270, |
| | | | | | | 1127101, 1127102, | 2347, and 450 |
| | | | | | | 1127103, and 941612 | |
| 12 | 2 | 5310 | 5350 | 51 | 68 | 1127259, 1311848, | 2044, 2121, |
| | | | | | | 1127260, 1127261, | 2198, 2275, |
| | | | | | | 1127262, 1127263, | 2352, 2429, and |
| | | | | | | 1127264, and 1127265 | 2506 |
| 13 | 2 | 5706 | 5762 | 56 | 78 | 1127298, 941637, | 2584, 70, and |
| | | | | | | 1127299, 1311867, | 2736 |
| | | | | | | 1311839, and 1127300 | |
| 14 | 2 | 6189 | 6221 | 51 | 69 | 1127357, 1127358, | 2201, 2278, |
| | | | | | | 1127359, 1127360, | 2355, 2432, |
| | | | | | | 1127361, 1127362, | 2509, 2586, |
| | | | | | | 1127363, 1127364, | 2662, 2738, |
| | | | | | | 1127365, 941646, and | 2815, 302, and |
| | | | | | | 1127366 | 2892 |
| 15 | 2 | 6986 | 7034 | 56 | 71 | 1127383, 1311860, | 1743, 1819, |
| | | | | | | 1127384, 1311861, | 1895, 1972, |
| | | | | | | 1127385, 1311859, | 2048, 456, 2125, |
| | | | | | | 1127386, 1127387, | 2202, 2279, and |
| | | | | | | 941648, 1311863, | 2356 |
| | | | | | | 1127388, 1311862, | |
| | | | | | | 1127389, 1311864, | |
| | | | | | | 1127390, and 1127391 | |
| 16 | 2 | 8371 | 8400 | 53 | 83 | 1127425, 1127426, | 2511, 2588, |
| | | | | | | 1127427, 1311851, | 2664, 2740, |
| | | | | | | 1127428, 1311852, | 2817, 2894, 520, |
| | | | | | | 1127429, 1311853, | 597, 3021, 673, |
| | | | | | | 1127430, 1311855, | 3022, and 750 |
| | | | | | | 1127431, 1311854, | |
| | | | | | | 1127432, 1251625, | |
| | | | | | | 1127433, 1251627, | |
| | | | | | | 1251628, 1251626, and | |
| | | | | | | 1127434 | |
| 17 | 2 | 8514 | 8555 | 49 | 66 | 127444, 127445, 127446, | 1514, 1591, |
| | | | | | | 127447, 941655, 127448, | 1668, 1745, 73, |
| | | | | | | and 127449 | 1821, and 1897 |
| 18 | 2 | 8826 | 8857 | 56 | 78 | 1127461, 1127462, | 2818, 2895, 521, |
| | | | | | | 1127463, 1127464, | 598, 674, 751, |
| | | | | | | 1127465, 1127466, and | and 827 |
| | | | | | | 1127467 | |
| 19 | 2 | 12100 | 12138 | 50 | 69 | 1127747, 1127748, | 2674, 2750, |
| | | | | | | 1127749, and 1127750 | 2827, and 2904 |
| 20 | 2 | 12612 | 12659 | 51 | 74 | 1127815, 1270775, | 532, 2976, 2964, |
| | | | | | | 1270762, 1127816, | 609, 310, 685, |
| | | | | | | 1270764, 941694, | 2972, 2988, |
| | | | | | | 1127817, 1270771, | 2993, 2959, 762, |
| | | | | | | 1270789, 1270795, | 2968, 838, 915, |
| | | | | | | 1270757, 1127818, | 992, 1069, 2973, |
| | | | | | | 1270767, 1127819, | 2992, and 1146 |
| | | | | | | 1127820, 1127821, | |
| | | | | | | 1127822, 1270772, | |
| | | | | | | 1270794, and 1127823 | |
| 21 | 2 | 16856 | 16910 | 54 | 76 | 1128026, 941726, | 1915, 469, 2068, |
| | | | | | | 1128027, 1128028, | 2979, 2967, |
| | | | | | | 1270778, 1270766, | 2958, 2938, |
| | | | | | | 1270756, 648408, 648409, | 2939, 2940, |
| | | | | | | 648410, 1311837, | 2997, 2996, |
| | | | | | | 1318984, 1311836, | 2941, 2995, |
| | | | | | | 1318985, 648411, | 2974, 2970, |
| | | | | | | 1311869, 1311835, | 2980, 2971, |
| | | | | | | 1270773, 1270769, | 2961, 2984, |
| | | | | | | 1270779, 1270770, | 2957, and 2145 |
| | | | | | | 1270759, 1270785, | |
| | | | | | | 1270755, and 1128029 | |
| 22 | 2 | 19917 | 19980 | 59 | 72 | 1128275, 1128276, | 1390, 1464, |
| | | | | | | 1128277, 941753, | 1540, 243, 1617, |
| | | | | | | 1128278, and 1128279 | and 1694 |
| 23 | 2 | 24606 | 24665 | 41 | 61 | 1128483, 1128484, | 2621, 2697, |
| | | | | | | 1128485, 1128486, and | 2773, 2850, and |
| | | | | | | 1128487 | 2927 |

### NONLIMITING DISCLOSURE AND INCORPORATION BY REFERENCE

[0598] Each of the literature and patent publications listed herein is incorporated by reference in its entirety.

[0599] While certain compounds, compositions and methods described herein have been described with specificity in accordance with certain embodiments, the following examples serve only to illustrate the compounds described herein and are not intended to limit the same. Each of the references, GenBank accession numbers, and the like recited in the present application is incorporated herein by reference in its entirety.

[0600] Although the sequence listing accompanying this filing identifies each sequence as either “RNA” or “DNA” as required, in reality, those sequences may be modified with any combination of chemical modifications. One of skill in the art will readily appreciate that such designation as “RNA” or “DNA” to describe modified oligonucleotides is, in certain instances, arbitrary. For example, an oligonucleotide comprising a nucleoside comprising a 2′-OH sugar moiety and a thymine base could be described as a DNA having a modified sugar moiety (2′-OH in place of one 2′-H of DNA) or as an RNA having a modified base (thymine (methylated uracil) in place of a uracil of RNA). Accordingly, nucleic acid sequences provided herein, including, but not limited to those in the sequence listing, are intended to encompass nucleic acids containing any combination of natural or modified RNA and/or DNA, unless otherwise stated, including, but not limited to such nucleic acids having modified nucleobases. By way of further example and without limitation, an oligomeric compound having the nucleobase sequence “ATCGATCG” encompasses any oligomeric compounds having such nucleobase sequence, whether modified or unmodified, including, but not limited to, such compounds comprising RNA bases, such as those having sequence “AUCGAUCG” and those having some DNA bases and some RNA bases such as “AUCGATCG” and oligomeric compounds having other modified nucleobases, such as “AT^{m}CGAUCG,” wherein ^{m}C indicates a cytosine base comprising a methyl group at the 5-position. Finally, for clarity, unless otherwise indicated, the phrase “nucleobase sequence of SEQ ID NO: X”, refers only to the sequence of nucleobases in that SEQ ID NO: X, independent of any sugar or internucleoside linkage modifications also described in such SEQ ID.

[0601] While effort has been made to accurately describe compounds in the accompanying sequence listing, should there be any discrepancies between a description in this specification and in the accompanying sequence listing, the description in the specification and not in the sequence listing is the accurate description.

[0602] Certain compounds described herein (e.g., modified oligonucleotides) have one or more asymmetric center and thus give rise to enantiomers, diastereomers, and other stereoisomeric configurations that may be defined, in terms of absolute stereochemistry, as (R) or (S), as α or β such as for sugar anomers, or as (D) or (L), such as for amino acids, etc. Compounds provided herein that are drawn or described as having certain stereoisomeric configurations include only the indicated compounds. Compounds provided herein that are drawn or described with undefined stereochemistry include all such possible isomers, including their stereorandom and optically pure forms, unless specified otherwise. Likewise, all cis- and trans-isomers and tautomeric forms of the compounds herein are also included unless otherwise indicated. Oligomeric compounds described herein include chirally pure or enriched mixtures as well as racemic mixtures. For example, oligomeric compounds having a plurality of phosphorothioate internucleoside linkages include such compounds in which chirality of the phosphorothioate internucleoside linkages is controlled or is random. Unless otherwise indicated, compounds described herein are intended to include corresponding salt forms.

[0603] The compounds described herein include variations in which one or more atoms are replaced with a non-radioactive isotope or radioactive isotope of the indicated element. For example, compounds herein that comprise hydrogen atoms encompass all possible deuterium substitutions for each of the ¹H hydrogen atoms. Isotopic substitutions encompassed by the compounds herein include but are not limited to: ²H or ³H in place of ¹H, ¹³C or ¹⁴C in place of ¹²C, ¹⁵N in place of ¹⁴N, ¹⁷O or ¹⁸O in place of ¹⁶O, and ³³S, ³⁴S, ³⁵S, or ³⁶S in place of ³²S. In certain embodiments, non-radioactive isotopic substitutions may impart new properties on the oligomeric compound that are beneficial for use as a therapeutic or research tool. In certain embodiments, radioactive isotopic substitutions may make the compound suitable for research or diagnostic purposes such as imaging.

### EXAMPLES

[0604] The following examples illustrate certain embodiments of the present disclosure and are not limiting. Moreover, where specific embodiments are provided, the inventors have contemplated generic application of those specific embodiments.

### Example 1: Effect of 5-10-5 MOE Gapmer Modified Oligonucleotides on Human GYS1 RNA In Vitro, Single Dose

[0605] Modified oligonucleotides complementary to human GYS1 nucleic acid were designed and tested for their single dose effects on GYS1 RNA in vitro. The modified oligonucleotides were tested in a series of experiments that had the same culture conditions.

[0606] The modified oligonucleotides in the tables below are 5-10-5 MOE gapmers. The gapmers are 20 nucleosides in length, wherein the central gap segment consists of ten 2′-β-D-deoxynucleosides and the 5′ and 3′ wing segments each consists of five 2′-MOE modified nucleosides. The sugar motif for the gapmers is (from 5′ to 3′): eeeeeddddddddddeeeee; wherein ‘d’ represents a 2′-β-D-deoxyribosyl sugar moiety, and ‘e’ represents a 2′-O(CH₂)₂OCH₃ ribosyl sugar moiety. The internucleoside linkage motif for the gapmers is (from 5′ to 3′): sososssssssssssooss; wherein each ‘o’ represents a phosphodiester internucleoside linkage and each ‘s’ represents a phosphorothioate internucleoside linkage. Each cytosine residue is a 5-methylcytosine.

[0607] “Start site” indicates the 5′-most nucleoside to which the modified oligonucleotide is complementary in the target nucleic acid sequence. “Stop site” indicates the 3′-most nucleoside to which the modified oligonucleotide is complementary in the target nucleic acid sequence. Each modified oligonucleotide listed in the Tables below is 100% complementary to either SEQ ID NO: 1 (GENBANK Accession No. NM_002103.4), or SEQ ID NO: 2 (the complement of GENBANK Accession No. NC_000019.10 truncated from nucleotides 48965001 to 48996000) or both. ‘N/A’ indicates that the modified oligonucleotide is not 100% complementary to that particular target nucleic acid sequence.

[0608] Cultured A431 cells were treated with modified oligonucleotide at a concentration of 4,000 nM using free uptake at a density of 10,000 cells per well. After a treatment period of approximately 48 hours, total RNA was isolated from the cells and GYS1 RNA levels were measured by quantitative real-time RTPCR. GYS1 RNA levels were measured by Human GYS1 primer probe set RTS36346 (forward sequence CACTACTGTGTCCCAGATCAC, designated herein as SEQ ID NO: 11; reverse sequence CTGAGCATGGAGGTTCTGG, designated herein as SEQ ID NO: 12; probe sequence AAGAGGAAACCAGATATTGTGACCCCC, designated herein as SEQ ID NO: 13). GYS1 RNA levels were normalized to total RNA content, as measured by RIBOGREEN®. Results are presented as percent reduction of GYS1 RNA relative to the amount of GYS1 RNA in untreated control cells (% reduction). As used herein, a value of ‘0’ indicates that treatment with the modified oligonucleotide did not reduce GYS1 RNA levels. Each table represents results from an individual assay plate. The values marked with the symbol “†” indicate that the modified oligonucleotide is complementary to the amplicon region of the primer probe set.

TABLE 2
Reduction of GYS1 RNA by 5-10-5 MOE gapmers in A431 cells

| | SEQ | SEQ | SEQ | SEQ | | | |
|---|---|---|---|---|---|---|---|
| | ID | ID | ID | ID | | | |
| | NO: 1 | NO: 1 | NO: 2 | NO: 2 | | | SEQ |
| Compound | Start | Stop | Start | Stop | | % | ID |
| Number | Site | Site | Site | Site | Sequence (5′ to 3′) | Reduction | No. |
| 941342 | 2 | 21 | 2649 | 2668 | GAAACCTCGCAGCCGCCAGG | 2 | 20 |
| 941348 | 83 | 102 | 2730 | 2749 | GACCGCACCCCTGCCCCGAA | 64 | 21 |
| 941354 | 128 | 147 | 2775 | 2794 | GGTGCCCGACGGGAAGCTTG | 4 | 22 |
| 941360 | 176 | 195 | 2823 | 2842 | CGGAGGTGTCTAGGGAATGC | 47 | 23 |
| 941366 | 238 | 257 | 2885 | 2904 | TGCGGTTTAAAGGCATGGCT | 86 | 24 |
| 941372 | 320 | 339 | 2967 | 2986 | GCCACTTCGAAGAGCACTGC | 5 | 25 |
| 941378 | 409 | 428 | 4567 | 4586 | AGTAGTTGTCGCCCCATTCG | 73 | 26 |
| 941384 | 427 | 446 | 4585 | 4604 | TGTACGGCCCCACCAGGAAG | 26 | 27 |
| 941390 | 440 | 459 | 4598 | 4617 | ACGCCCTGCTCCGTGTACGG | 52 | 28 |
| 941396 | 553 | 572 | 8627 | 8646 | CTCCCTCGATCAGCCAGCGC | 25 | 29 |
| 941398 | 558 | 577 | 8632 | 8651 | AGGGCCTCCCTCGATCAGCC | 36 | 30 |
| 941403 | 645 | 664 | 8719 | 8738 | CACTCCGATGTTGCAGGTAT | 33 | 31 |
| 941409 | 807 | 826 | 10039 | 10058 | TCGCCGGGCACGACACAGGC | 0 | 32 |
| 941415 | 873 | 892 | 10105 | 10124 | GGCACCGGCACACAGGTAGC | 16 | 33 |
| 941421 | 973 | 992 | 10449 | 10468 | AGTGGGCTGCCGCCCTTTCC | 0 | 34 |
| 941427 | 1021 | 1040 | 10497 | 10516 | GTGCCTCGATGGCGGTGATC | 87† | 35 |
| 941433 | 1133 | 1152 | 13232 | 13251 | ATTCGAGCCTTGCTCTGAGC | 12† | 36 |
| 941439 | 1210 | 1229 | 13653 | 13672 | CGGCGATAAAGAAGTATAAG | 60 | 37 |
| 941445 | 1222 | 1241 | 13665 | 13684 | ACTCATAGCGGCCGGCGATA | 11 | 38 |
| 941451 | 1233 | 1252 | 13676 | 13695 | CTTGTTGGAGAACTCATAGC | 61 | 39 |
| 941457 | 1314 | 1333 | 14375 | 14394 | GGCAACCACTGTCTGCTCGC | 31 | 40 |
| 941463 | 1471 | 1490 | 17999 | 18018 | TCATGTCGGGAAGGCTCCCA | 25 | 41 |
| 941469 | 1620 | 1639 | 21338 | 21357 | GAAGAGGCCGATTCGGCGGA | 19 | 42 |
| 941475 | 1723 | 1742 | 21721 | 21740 | GACAGCCACGGACAAACTCC | 32 | 43 |
| 941481 | 1795 | 1814 | 24982 | 25001 | GGATTCCCATAACCGTGCAC | 0 | 44 |
| 941487 | 1890 | 1909 | 25295 | 25314 | CCGCCGGTCAAGAATGTAGA | 2 | 45 |
| 941493 | 1911 | 1930 | 25316 | 25335 | GGAATCATCCAGGCTGCGGA | 14 | 46 |
| 941499 | 1968 | 1987 | 25373 | 25392 | ACGCTGCCGCCGGCTCTGCT | 0 | 47 |
| 941505 | 2011 | 2030 | 25416 | 25435 | CCAGAAGGTCGGAGAGGCGC | 0 | 48 |
| 941511 | 2092 | 2111 | 26187 | 26206 | CGTAGGTGAAGTGCTCTGGA | 62 | 49 |
| 941517 | 2159 | 2178 | 26417 | 26436 | GGCGACGGTGGCACCGAGGC | 11 | 50 |
| 941523 | 2200 | 2219 | 26458 | 26477 | CGTCCTCACTCTGGTGCGGG | 61 | 51 |
| 941529 | 2290 | 2309 | 26548 | 26567 | CACGGATGTTGCGCCGGTCC | 22 | 52 |
| 941535 | 2346 | 2365 | 26604 | 26623 | GCGCTTGCTGCCGCTGGTGG | 44 | 53 |
| 941541 | 2364 | 2383 | 26622 | 26641 | GGCCGTGTCCACAGAGTTGC | 13 | 54 |
| 941547 | 2444 | 2463 | 26702 | 26721 | GGGCGGACTTAGTTACGCTC | 0 | 55 |
| 941553 | 2634 | 2653 | 26892 | 26911 | GGCACGGCTTTGTGGATTCT | 93 | 56 |
| 941559 | 2850 | 2869 | 27108 | 27127 | CCGCATGCCGGGCCTGAGCG | 9 | 57 |
| 941565 | 2898 | 2917 | 27156 | 27175 | GATCGCCCCATTCGCAGGGA | 56 | 58 |
| 941571 | 2922 | 2941 | 27180 | 27199 | TGAAAGTGCCCCGGCTCTGG | 30 | 59 |
| 941577 | 3053 | 3072 | 27311 | 27330 | GGAGCCGGATGGAGGGATCC | 4 | 60 |
| 941583 | 3285 | 3304 | 27543 | 27562 | AGAGCAGTTGGGAATAAGCC | 80 | 61 |
| 941589 | 3403 | 3422 | 27661 | 27680 | GGTTCTAGAACCCAGTGACC | 28 | 62 |
| 941595 | 3560 | 3579 | 27818 | 27837 | TCCGGACACACTCCAATCAC | 37 | 63 |
| 941601 | N/A | N/A | 3049 | 3068 | GTTCCGGGCCCCCATCCACT | 59 | 64 |
| 941607 | N/A | N/A | 3346 | 3365 | TGAAACCCCGGCAGCTTCCC | 44 | 65 |
| 941613 | N/A | N/A | 3616 | 3635 | TGACTAACTTAGGACTTCCC | 55 | 66 |
| 941619 | N/A | N/A | 4057 | 4076 | ACCCCCTCATGGCCAATCCA | 18 | 67 |
| 941625 | N/A | N/A | 4474 | 4493 | AGGCCCCGGCCGAGGTCCAT | 0 | 68 |
| 941631 | N/A | N/A | 5334 | 5353 | TCCCAGCACCGCTAGAAGGT | 9 | 69 |
| 941637 | N/A | N/A | 5731 | 5750 | TTTCTCCTTGGACAACAGCG | 96 | 70 |
| | | | 5765 | 5784 | | | |
| 941643 | N/A | N/A | 5902 | 5921 | CCCTTAGGGACACAGTCGGA | 63 | 71 |
| 941649 | N/A | N/A | 7221 | 7240 | CAAGGTATCACATCCCGGCT | 68 | 72 |
| 941655 | N/A | N/A | 8533 | 8552 | TCCGTGGTTCTCCCATTTGC | 72 | 73 |
| 941661 | N/A | N/A | 8814 | 8833 | GGTGGAATGTGTCAGACGGG | 47 | 74 |
| 941667 | N/A | N/A | 9673 | 9692 | GTTAGATTGGACAGACTGAA | 73 | 75 |
| 941673 | N/A | N/A | 10168 | 10187 | ACTCGCAGTCCCCCATCTGC | 18 | 76 |
| 941679 | N/A | N/A | 10772 | 10791 | GGCGAATATTTTAGACAGGG | 93 | 77 |
| 941685 | N/A | N/A | 12096 | 12115 | GCCTCAAATACAGGTCACCA | 51 | 78 |
| 941691 | N/A | N/A | 12472 | 12491 | CCTAGGATATATCCTCTACT | 18 | 79 |
| 941697 | N/A | N/A | 13133 | 13152 | GGTGAGGGTCCCATGTTTTA | 47 | 80 |
| 941703 | N/A | N/A | 13616 | 13635 | GTCCAGATGCCTAAAGAACC | 18 | 81 |
| 941709 | N/A | N/A | 14462 | 14481 | GGCTGCTAACCAAAGCTGTT | 25 | 82 |
| 941715 | N/A | N/A | 15654 | 15673 | CCGTCTACAGGATTTTCTAG | 97 | 83 |
| 941721 | N/A | N/A | 16731 | 16750 | CCACGGTCACTCCTCCACTT | 80 | 84 |
| 941727 | N/A | N/A | 16930 | 16949 | GAGGTTTGCGATGAGGACCC | 55 | 85 |
| 941733 | N/A | N/A | 17894 | 17913 | GGGCACTCACACCAGTAAGG | 15 | 86 |
| 941739 | N/A | N/A | 19197 | 19216 | GTGTCCGCCTCGCTCTGTTG | 21 | 87 |
| 941745 | N/A | N/A | 19427 | 19446 | ACCGCAGCTGCTGAGAGTTT | 8 | 88 |
| 941751 | N/A | N/A | 19769 | 19788 | GTTAGCCAAAAGCAGTTCAC | 30 | 89 |
| 941757 | N/A | N/A | 20673 | 20692 | AGCGATGCATCCGTTTTGGC | 50 | 90 |
| 941763 | N/A | N/A | 21770 | 21789 | CCCGGTGTGTAGCCCCAAGG | 21 | 91 |
| 941769 | N/A | N/A | 22144 | 22163 | GGCTAATGTGAACCAACAAG | 63 | 92 |
| 941775 | N/A | N/A | 22884 | 22903 | GGTGGTTCCCCCGCCGCTGT | 0 | 93 |
| 941781 | N/A | N/A | 24699 | 24718 | TATTGAGCATCCCAATATCC | 0 | 94 |
| 941787 | N/A | N/A | 24970 | 24989 | CCGTGCACTCAGCTGCGGGA | 0 | 95 |
| 941793 | N/A | N/A | 25566 | 25585 | ATCGGCCTGGTTCATTGCTT | 16 | 96 |
| 941799 | N/A | N/A | 25992 | 26011 | GACTCCACCCCTTATGTAGA | 5 | 97 |

TABLE 3
Reduction of GYS1 RNA by 5-10-5 MOE gapmers in A431 cells

| | SEQ | SEQ | SEQ | SEQ | | | |
|---|---|---|---|---|---|---|---|
| | ID | ID | ID | ID | | | |
| | NO: 1 | NO: 1 | NO: 2 | NO: 2 | | | SEQ |
| Compound | Start | Stop | Start | Stop | | % | ID |
| Number | Site | Site | Site | Site | Sequence (5′ to 3′) | Reduction | No. |
| 941343 | 6 | 25 | 2653 | 2672 | CAGTGAAACCTCGCAGCCGC | 4 | 98 |
| 941349 | 90 | 109 | 2737 | 2756 | ATTGCAAGACCGCACCCCTG | 35 | 99 |
| 941355 | 131 | 150 | 2778 | 2797 | GCTGGTGCCCGACGGGAAGC | 28 | 100 |
| 941361 | 179 | 198 | 2826 | 2845 | CCCCGGAGGTGTCTAGGGAA | 18 | 101 |
| 941367 | 244 | 263 | 2891 | 2910 | ACAAAGTGCGGTTTAAAGGC | 84 | 102 |
| 941373 | 323 | 342 | 2970 | 2989 | CAGGCCACTTCGAAGAGCAC | 9 | 103 |
| 941379 | 414 | 433 | 4572 | 4591 | CAGGAAGTAGTTGTCGCCCC | 56 | 104 |
| 941385 | 430 | 449 | 4588 | 4607 | CCGTGTACGGCCCCACCAGG | 25 | 105 |
| 941391 | 442 | 461 | 4600 | 4619 | TCACGCCCTGCTCCGTGTAC | 21 | 106 |
| 941397 | 554 | 573 | 8628 | 8647 | CCTCCCTCGATCAGCCAGCG | 51 | 107 |
| 941398 | 558 | 577 | 8632 | 8651 | AGGGCCTCCCTCGATCAGCC | 34 | 30 |
| 941404 | 651 | 670 | 8725 | 8744 | CCACGGCACTCCGATGTTGC | 46 | 108 |
| 941410 | 812 | 831 | 10044 | 10063 | GGCAGTCGCCGGGCACGACA | 14 | 109 |
| 941416 | 876 | 895 | 10108 | 10127 | CACGGCACCGGCACACAGGT | 43 | 110 |
| 941422 | 977 | 996 | 10453 | 10472 | GCGCAGTGGGCTGCCGCCCT | 0 | 111 |
| 941428 | 1024 | 1043 | 10500 | 10519 | GCTGTGCCTCGATGGCGGTG | 93† | 112 |
| 941434 | 1151 | 1170 | 13250 | 13269 | CCCCGCACAAACTCCTGGAT | 7 | 113 |
| 941440 | 1212 | 1231 | 13655 | 13674 | GCCGGCGATAAAGAAGTATA | 0 | 114 |
| 941446 | 1224 | 1243 | 13667 | 13686 | GAACTCATAGCGGCCGGCGA | 5 | 115 |
| 941452 | 1243 | 1262 | 13686 | 13705 | CGTCAGCACCCTTGTTGGAG | 71 | 116 |
| 941458 | 1336 | 1355 | 14397 | 14416 | TCCGCGCTGGCATGATGAAG | 29 | 117 |
| 941464 | 1476 | 1495 | 18004 | 18023 | CTTGTTCATGTCGGGAAGGC | 21 | 118 |
| 941470 | 1631 | 1650 | 21349 | 21368 | GCACTGCTATTGAAGAGGCC | 0 | 119 |
| 941476 | 1761 | 1780 | 21759 | 21778 | GCCCCAAGGCTCATAGTAGG | 6 | 120 |
| 941482 | 1822 | 1841 | 25009 | 25028 | AGCCGGAGAGATTGGTGGAG | 38 | 121 |
| 941488 | 1897 | 1916 | 25302 | 25321 | TGCGGAACCGCCGGTCAAGA | 6 | 122 |
| 941494 | 1917 | 1936 | 25322 | 25341 | CGAGCAGGAATCATCCAGGC | 0 | 123 |
| 941500 | 1972 | 1991 | 25377 | 25396 | TGATACGCTGCCGCCGGCTC | 0 | 124 |
| 941506 | 2018 | 2037 | 25423 | 25442 | TTCCAGTCCAGAAGGTCGGA | 0 | 125 |
| 941512 | 2131 | 2150 | 26389 | 26408 | GGTAGCGGTACCCCTGGGCC | 3 | 126 |
| 941518 | 2164 | 2183 | 26422 | 26441 | GCGAGGGCGACGGTGGCACC | 30 | 127 |
| 941524 | 2230 | 2249 | 26488 | 26507 | CCTCCAGCGGCCCGTTCCGG | 33 | 128 |
| 941530 | 2297 | 2316 | 26555 | 26574 | TCTGGTGCACGGATGTTGCG | 34 | 129 |
| 941536 | 2349 | 2368 | 26607 | 26626 | GTTGCGCTTGCTGCCGCTGG | 47 | 130 |
| 941542 | 2430 | 2449 | 26688 | 26707 | ACGCTCCTCGCCCAGGGAGC | 16 | 131 |
| 941548 | 2515 | 2534 | 26773 | 26792 | GGGTTTAGGAGCAGCACCCC | 0 | 132 |
| 941554 | 2666 | 2685 | 26924 | 26943 | CGCTGATTATGCATATTCTG | 82 | 133 |
| 941560 | 2856 | 2875 | 27114 | 27133 | GGTGGCCCGCATGCCGGGCC | 0 | 134 |
| 941566 | 2903 | 2922 | 27161 | 27180 | GACTTGATCGCCCCATTCGC | 63 | 135 |
| 941572 | 2925 | 2944 | 27183 | 27202 | CTCTGAAAGTGCCCCGGCTC | 43 | 136 |
| 941578 | 3061 | 3080 | 27319 | 27338 | GGATGACAGGAGCCGGATGG | 45 | 137 |
| 941584 | 3306 | 3325 | 27564 | 27583 | CCTAGTGGTTTCACAGTGGG | 66 | 138 |
| 941590 | 3423 | 3442 | 27681 | 27700 | AGCCTCGAGGTAAATGTGGG | 41 | 139 |
| 941596 | 3565 | 3584 | 27823 | 27842 | TCATCTCCGGACACACTCCA | 70 | 140 |
| 941602 | N/A | N/A | 3087 | 3106 | AGGGTTCCCCTAGTAGCCCC | 20 | 141 |
| 941608 | N/A | N/A | 3374 | 3393 | CTAGACCATGCTGTTAGGGT | 60 | 142 |
| 941614 | N/A | N/A | 3624 | 3643 | CCAGCCTCTGACTAACTTAG | 58 | 143 |
| 941620 | N/A | N/A | 4093 | 4112 | TAAATCGCAGCCAGGCTCCA | 31 | 144 |
| 941626 | N/A | N/A | 4741 | 4760 | GGCTCCCACCCCGATGGCAG | 19 | 145 |
| 941632 | N/A | N/A | 5408 | 5427 | CACCGCCCACACAATGTGCT | 22 | 146 |
| 941638 | N/A | N/A | 5744 | 5763 | GCCGCCTGATGGCTTTCTCC | 11 | 147 |
| | | | 5778 | 5797 | | | |
| 941644 | N/A | N/A | 5971 | 5990 | GGGCTATTCTTAGGCCCCCA | 4 | 148 |
| 941650 | N/A | N/A | 7382 | 7401 | GAGCCACCTAAAGCAGGCCC | 6 | 149 |
| 941656 | N/A | N/A | 8539 | 8558 | CACTCATCCGTGGTTCTCCC | 66 | 150 |
| 941662 | N/A | N/A | 8899 | 8918 | TAAAGGACCCTATGACTCCC | 42 | 151 |
| 941668 | N/A | N/A | 9682 | 9701 | CCTGGCAGGGTTAGATTGGA | 53 | 152 |
| 941674 | N/A | N/A | 10309 | 10328 | GGGTCCCAAGAGAAATTGGT | 15 | 153 |
| 941680 | N/A | N/A | 10773 | 10792 | TGGCGAATATTTTAGACAGG | 63 | 154 |
| 941686 | N/A | N/A | 12195 | 12214 | GACCAATCTACATTAGCCAA | 87 | 155 |
| 941692 | N/A | N/A | 12523 | 12542 | TTAGCCCACCCTGAGATGGA | 30 | 156 |
| 941698 | N/A | N/A | 13264 | 13283 | ACCCATAAAAATGGCCCCGC | 57 | 157 |
| 941704 | N/A | N/A | 13793 | 13812 | GGCTGTTCTCCCTAGTTATA | 31 | 158 |
| 941710 | N/A | N/A | 14467 | 14486 | GCGAGGGCTGCTAACCAAAG | 65 | 159 |
| 941716 | N/A | N/A | 15712 | 15731 | GTCCTGACAACCCCGTCTCA | 41 | 160 |
| 941722 | N/A | N/A | 16778 | 16797 | GGACCACTTAGGCACACAAG | 96 | 161 |
| 941728 | N/A | N/A | 17047 | 17066 | TGGAAGGCTTAGGACCCACG | 47 | 162 |
| 941734 | N/A | N/A | 17995 | 18014 | GTCGGGAAGGCTCCCACTGC | 5 | 163 |
| 941740 | N/A | N/A | 19204 | 19223 | TGTGTATGTGTCCGCCTCGC | 42 | 164 |
| 941746 | N/A | N/A | 19498 | 19517 | GTTAGGGATCTAAAGCAGCT | 47 | 165 |
| 941752 | N/A | N/A | 19841 | 19860 | AACTCCCAGCATCCCGATGG | 8 | 166 |
| 941758 | N/A | N/A | 21112 | 21131 | ACCAGGAGTTGTGGATTCCC | 59 | 167 |
| 941764 | N/A | N/A | 21846 | 21865 | GCCAGTGCCTCGCCCCAAGA | 0 | 168 |
| 941770 | N/A | N/A | 22427 | 22446 | GCACAGCACTGCCGGAGTGC | 5 | 169 |
| 941776 | N/A | N/A | 23980 | 23999 | CGAGCACACAACACTACGCA | 19 | 170 |
| 941782 | N/A | N/A | 24728 | 24747 | TCCATAGTTGGGAGATAAGG | 13 | 171 |
| 941788 | N/A | N/A | 25062 | 25081 | GCGCTGACCGTAAGCTGAGG | 39 | 172 |
| 941794 | N/A | N/A | 25579 | 25598 | AGCCACCATCGCGATCGGCC | 3 | 173 |
| 941800 | N/A | N/A | 26056 | 26075 | CTTGGCCACACCCTTTATGC | 32 | 174 |

TABLE 4
Reduction of GYS1 RNA by 5-10-5 MOE gapmers in A431 cells

| | SEQ | SEQ | SEQ | SEQ | | | |
|---|---|---|---|---|---|---|---|
| | ID | ID | ID | ID | | | |
| | NO: 1 | NO: 1 | NO: 2 | NO: 2 | | | SEQ |
| Compound | Start | Stop | Start | Stop | | % | ID |
| Number | Site | Site | Site | Site | Sequence (5′ to 3′) | Reduction | No. |
| 941344 | 12 | 31 | 2659 | 2678 | CCCCTGCAGTGAAACCTCGC | 10 | 175 |
| 941350 | 97 | 116 | 2744 | 2763 | GCTTCCTATTGCAAGACCGC | 18 | 176 |
| 941356 | 136 | 155 | 2783 | 2802 | GAGTAGCTGGTGCCCGACGG | 56 | 177 |
| 941362 | 182 | 201 | 2829 | 2848 | GGACCCCGGAGGTGTCTAGG | 0 | 178 |
| 941368 | 252 | 271 | 2899 | 2918 | GGACATGGACAAAGTGCGGT | 69 | 179 |
| 941374 | 329 | 348 | 2976 | 2995 | ACCTCCCAGGCCACTTCGAA | 31 | 180 |
| 941380 | 417 | 436 | 4575 | 4594 | CACCAGGAAGTAGTTGTCGC | 47 | 181 |
| 941386 | 432 | 451 | 4590 | 4609 | CTCCGTGTACGGCCCCACCA | 65 | 182 |
| 941392 | 444 | 463 | 4602 | 4621 | CCTCACGCCCTGCTCCGTGT | 32 | 183 |
| 941398 | 558 | 577 | 8632 | 8651 | AGGGCCTCCCTCGATCAGCC | 36 | 30 |
| 941399 | 561 | 580 | 8635 | 8654 | CAGAGGGCCTCCCTCGATCA | 9 | 184 |
| 941405 | 655 | 674 | 8729 | 8748 | CGTACCACGGCACTCCGATG | 72 | 185 |
| 941411 | 818 | 837 | 10050 | 10069 | GCTACAGGCAGTCGCCGGGC | 11 | 186 |
| 941417 | 879 | 898 | 10111 | 10130 | GTCCACGGCACCGGCACACA | 20 | 187 |
| 941423 | 980 | 999 | 10456 | 10475 | TGAGCGCAGTGGGCTGCCGC | 0 | 188 |
| 941429 | 1026 | 1045 | 10502 | 10521 | GTGCTGTGCCTCGATGGCGG | 84† | 189 |
| 941435 | 1155 | 1174 | 13254 | 13273 | ATGGCCCCGCACAAACTCCT | 19 | 190 |
| 941441 | 1215 | 1234 | 13658 | 13677 | GCGGCCGGCGATAAAGAAGT | 0 | 191 |
| 941447 | 1225 | 1244 | 13668 | 13687 | AGAACTCATAGCGGCCGGCG | 0 | 192 |
| 941453 | 1272 | 1291 | 13715 | 13734 | GTTGAGCCGAGCCAATGCCT | 42 | 193 |
| 941459 | 1341 | 1360 | 14402 | 14421 | GTTGGTCCGCGCTGGCATGA | 76 | 194 |
| 941465 | 1570 | 1589 | 21288 | 21307 | CCAGCATATTGTGGGTGCAC | 39 | 195 |
| 941471 | 1639 | 1658 | 21357 | 21376 | CCCTGTCGGCACTGCTATTG | 23 | 196 |
| 941477 | 1764 | 1783 | 21762 | 21781 | GTAGCCCCAAGGCTCATAGT | 21 | 197 |
| 941483 | 1837 | 1856 | 25024 | 25043 | CCATGAAGCAGCCGAAGCCG | 9 | 198 |
| 941489 | 1900 | 1919 | 25305 | 25324 | GGCTGCGGAACCGCCGGTCA | 0 | 199 |
| 941495 | 1921 | 1940 | 25326 | 25345 | GCTGCGAGCAGGAATCATCC | 0 | 200 |
| 941501 | 1980 | 1999 | 25385 | 25404 | CCGCTGGATGATACGCTGCC | 0 | 201 |
| 941507 | 2029 | 2048 | 25434 | 25453 | GGCCTAGGTATTTCCAGTCC | 27 | 202 |
| 941513 | 2137 | 2156 | 26395 | 26414 | GCCGTGGGTAGCGGTACCCC | 5 | 203 |
| 941519 | 2168 | 2187 | 26426 | 26445 | GACAGCGAGGGCGACGGTGG | 30 | 204 |
| 941525 | 2236 | 2255 | 26494 | 26513 | CGTCTTCCTCCAGCGGCCCG | 0 | 205 |
| 941531 | 2301 | 2320 | 26559 | 26578 | CCACTCTGGTGCACGGATGT | 55 | 206 |
| 941537 | 2351 | 2370 | 26609 | 26628 | GAGTTGCGCTTGCTGCCGCT | 35 | 207 |
| 941543 | 2433 | 2452 | 26691 | 26710 | GTTACGCTCCTCGCCCAGGG | 68 | 208 |
| 941549 | 2536 | 2555 | 26794 | 26813 | CCCAGTGCAGATCTGGAGCG | 14 | 209 |
| 941555 | 2730 | 2749 | 26988 | 27007 | CACCGCAGAGTAATGGCAGA | 78 | 210 |
| 941561 | 2859 | 2878 | 27117 | 27136 | CTTGGTGGCCCGCATGCCGG | 0 | 211 |
| 941567 | 2909 | 2928 | 27167 | 27186 | GCTCTGGACTTGATCGCCCC | 45 | 212 |
| 941573 | 2928 | 2947 | 27186 | 27205 | AAACTCTGAAAGTGCCCCGG | 90 | 213 |
| 941579 | 3097 | 3116 | 27355 | 27374 | GTGGTTCTACCACCTCTTGC | 5 | 214 |
| 941585 | 3317 | 3336 | 27575 | 27594 | AGGACCTAGAACCTAGTGGT | 59 | 215 |
| 941591 | 3432 | 3451 | 27690 | 27709 | GGATGGAAGAGCCTCGAGGT | 15 | 216 |
| 941597 | 3570 | 3589 | 27828 | 27847 | TCATCTCATCTCCGGACACA | 94 | 217 |
| 941603 | N/A | N/A | 3168 | 3187 | GTCAAACGAACCATCCCTCT | 46 | 218 |
| 941609 | N/A | N/A | 3434 | 3453 | ACCGCCGCTCAGGCCTCCTA | 1 | 219 |
| 941615 | N/A | N/A | 3742 | 3761 | GTGTGAGATTGGCTTGTTCC | 89 | 220 |
| 941621 | N/A | N/A | 4138 | 4157 | ACCCGGACTCAGGTTCCCGA | 43 | 221 |
| 941627 | N/A | N/A | 4801 | 4820 | GTGTCCAAGCCTGCCTCGCT | 61 | 222 |
| 941633 | N/A | N/A | 5460 | 5479 | TCCAAGCTTGGCTGTTAGTA | 70 | 223 |
| 941639 | N/A | N/A | 5745 | 5764 | TGCCGCCTGATGGCTTTCTC | 21 | 224 |
| | | | 5779 | 5798 | | | |
| 941645 | N/A | N/A | 6067 | 6086 | CGCTCCTCGCCGACCTGGCT | 24 | 225 |
| 941651 | N/A | N/A | 7663 | 7682 | AATTCCTTCCACGGGATGCT | 74 | 226 |
| 941657 | N/A | N/A | 8544 | 8563 | ATCTTCACTCATCCGTGGTT | 48 | 227 |
| 941663 | N/A | N/A | 8963 | 8982 | ATCGAGAGTAGAGCCTGGGC | 31 | 228 |
| 941669 | N/A | N/A | 9834 | 9853 | AGAGTGGGCAGCGGCCCACT | 20 | 229 |
| 941675 | N/A | N/A | 10356 | 10375 | GTCCGGTTAGAAGGATTGGG | 28 | 230 |
| 941681 | N/A | N/A | 10892 | 10911 | GGCCACCCAAATCATGCAAT | 14 | 231 |
| 941687 | N/A | N/A | 12258 | 12277 | GCCCAGTTCTGACCTAACCT | 26 | 232 |
| 941693 | N/A | N/A | 12577 | 12596 | GGGATCTGATCCACACTGGT | 58 | 233 |
| 941699 | N/A | N/A | 13302 | 13321 | CGCCCTCCTCTCTTAAGACC | 15 | 234 |
| 941705 | N/A | N/A | 14173 | 14192 | ACGGCCCCCCACCATACTCA | 26 | 235 |
| 941711 | N/A | N/A | 14471 | 14490 | CGGAGCGAGGGCTGCTAACC | 0 | 236 |
| 941717 | N/A | N/A | 15747 | 15766 | CGTCTCTGCCCAATAACACT | 76 | 237 |
| 941723 | N/A | N/A | 16851 | 16870 | GGACTTGTACTTGTCCTGCA | 32 | 238 |
| 941729 | N/A | N/A | 17161 | 17180 | TGCCGCGCCCAGCTACCCTT | 32 | 239 |
| 941735 | N/A | N/A | 18104 | 18123 | GGCTGCCAGGAACTGCTATC | 0 | 240 |
| 941741 | N/A | N/A | 19299 | 19318 | CCGTGTGCAGCAAGGCCCAA | 0 | 241 |
| 941747 | N/A | N/A | 19571 | 19590 | GTAGTTTTTTGGGCCCCTAG | 28 | 242 |
| 941753 | N/A | N/A | 19932 | 19951 | GGGTGTATAGTTCTTAGCAA | 66 | 243 |
| 941759 | N/A | N/A | 21187 | 21206 | ATGAGCCATGCGGACCCTGG | 35 | 244 |
| 941765 | N/A | N/A | 21914 | 21933 | CGCGCTGTAGCAGAACAGGT | 32 | 245 |
| 941771 | N/A | N/A | 22539 | 22558 | GCACAGTTTGCAGGACTTGT | 64 | 246 |
| 941777 | N/A | N/A | 24525 | 24544 | CCTGTGTACAGAGCATCTAG | 33 | 247 |
| 941783 | N/A | N/A | 24731 | 24750 | AAGTCCATAGTTGGGAGATA | 47 | 248 |
| 941789 | N/A | N/A | 25180 | 25199 | CGGCCCGAGAGCCCCCCCAT | 22 | 249 |
| 941795 | N/A | N/A | 25627 | 25646 | TGCGATCCTTCCTGTTAGGC | 57 | 250 |
| 941801 | N/A | N/A | 26144 | 26163 | GCGCGCAGACATATAGTACT | 0 | 251 |

TABLE 5
Reduction of GYS1 RNA by 5-10-5 MOE gapmers in A431 cells

| | SEQ | SEQ | SEQ | SEQ | | | |
|---|---|---|---|---|---|---|---|
| | ID | ID | ID | ID | | | |
| | NO: 1 | NO: 1 | NO: 2 | NO: 2 | | | SEQ |
| Compound | Start | Stop | Start | Stop | | % | ID |
| Number | Site | Site | Site | Site | Sequence (5′ to 3′) | Reduction | No. |
| 941345 | 32 | 51 | 2679 | 2698 | CGTCACTGAGCCCACTGGCG | 0 | 252 |
| 941351 | 104 | 123 | 2751 | 2770 | ACGCTCGGCTTCCTATTGCA | 24 | 253 |
| 941357 | 160 | 179 | 2807 | 2826 | ATGCACCAGGTAGGGTGCGG | 0 | 254 |
| 941363 | 187 | 206 | 2834 | 2853 | GGTAGGGACCCCGGAGGTGT | 17 | 255 |
| 941369 | 289 | 308 | 2936 | 2955 | CGAATTCATCCTCCCAGTCC | 48 | 256 |
| 941375 | 361 | 380 | 4519 | 4538 | GCACCGTGTAGATGCCACCC | 34 | 257 |
| 941381 | 419 | 438 | 4577 | 4596 | CCCACCAGGAAGTAGTTGTC | 41 | 258 |
| 941387 | 433 | 452 | 4591 | 4610 | GCTCCGTGTACGGCCCCACC | 28 | 259 |
| 941393 | 447 | 466 | 4605 | 4624 | GGTCCTCACGCCCTGCTCCG | 29 | 260 |
| 941398 | 558 | 577 | 8632 | 8651 | AGGGCCTCCCTCGATCAGCC | 38 | 30 |
| 941400 | 564 | 583 | 8638 | 8657 | CACCAGAGGGCCTCCCTCGA | 0 | 261 |
| 941406 | 773 | 792 | 10005 | 10024 | GCCAACCACTCATGGAAGTG | 59 | 262 |
| 941412 | 821 | 840 | 10053 | 10072 | GTTGCTACAGGCAGTCGCCG | 0 | 263 |
| 941418 | 887 | 906 | 10119 | 10138 | TTGTAGAAGTCCACGGCACC | 8 | 264 |
| 941424 | 1011 | 1030 | 10487 | 10506 | GGCGGTGATCTGGGACACAG | 97† | 265 |
| 941430 | 1028 | 1047 | 10504 | 10523 | AAGTGCTGTGCCTCGATGGC | 82† | 266 |
| 941436 | 1164 | 1183 | 13263 | 13282 | CCCATAAAAATGGCCCCGCA | 26 | 267 |
| 941442 | 1216 | 1235 | 13659 | 13678 | AGCGGCCGGCGATAAAGAAG | 0 | 268 |
| 941448 | 1226 | 1245 | 13669 | 13688 | GAGAACTCATAGCGGCCGGC | 0 | 269 |
| 941454 | 1279 | 1298 | 13722 | 13741 | GCAGATAGTTGAGCCGAGCC | 51 | 270 |
| 941460 | 1345 | 1364 | 14406 | 14425 | AATTGTTGGTCCGCGCTGGC | 36 | 271 |
| 941466 | 1575 | 1594 | 21293 | 21312 | GTCATCCAGCATATTGTGGG | 74 | 272 |
| 941472 | 1642 | 1661 | 21360 | 21379 | TCACCCTGTCGGCACTGCTA | 5 | 273 |
| 941478 | 1768 | 1787 | 21766 | 21785 | GTGTGTAGCCCCAAGGCTCA | 3 | 274 |
| 941484 | 1852 | 1871 | 25039 | 25058 | CTGCGATGTGTTCCTCCATG | 72 | 275 |
| 941490 | 1903 | 1922 | 25308 | 25327 | CCAGGCTGCGGAACCGCCGG | 44 | 276 |
| 941496 | 1925 | 1944 | 25330 | 25349 | GTGAGCTGCGAGCAGGAATC | 0 | 277 |
| 941502 | 1984 | 2003 | 25389 | 25408 | GGTTCCGCTGGATGATACGC | 11 | 278 |
| 941508 | 2052 | 2071 | 26147 | 26166 | GTGGCGCGCAGACATATAGT | 0 | 279 |
| 941514 | 2142 | 2161 | 26400 | 26419 | GGCTGGCCGTGGGTAGCGGT | 14 | 280 |
| 941520 | 2171 | 2190 | 26429 | 26448 | CGTGACAGCGAGGGCGACGG | 18 | 281 |
| 941526 | 2239 | 2258 | 26497 | 26516 | CGCCGTCTTCCTCCAGCGGC | 9 | 282 |
| 941532 | 2305 | 2324 | 26563 | 26582 | GCGGCCACTCTGGTGCACGG | 0 | 283 |
| 941538 | 2355 | 2374 | 26613 | 26632 | CACAGAGTTGCGCTTGCTGC | 36 | 284 |
| 941544 | 2437 | 2456 | 26695 | 26714 | CTTAGTTACGCTCCTCGCCC | 18 | 285 |
| 941550 | 2574 | 2593 | 26832 | 26851 | GTGTTTGGCGGACTGGGTGG | 9 | 286 |
| 941556 | 2738 | 2757 | 26996 | 27015 | TCTGGCACCACCGCAGAGTA | 48 | 287 |
| 941562 | 2865 | 2884 | 27123 | 27142 | CCAGAACTTGGTGGCCCGCA | 42 | 288 |
| 941568 | 2910 | 2929 | 27168 | 27187 | GGCTCTGGACTTGATCGCCC | 23 | 289 |
| 941574 | 2959 | 2978 | 27217 | 27236 | AATGGAGGACCATCTGCTCT | 71 | 290 |
| 941580 | 3105 | 3124 | 27363 | 27382 | GCAGCCAAGTGGTTCTACCA | 28 | 291 |
| 941586 | 3320 | 3339 | 27578 | 27597 | GCCAGGACCTAGAACCTAGT | 51 | 292 |
| 941592 | 3511 | 3530 | 27769 | 27788 | AACCAAGCGGTGCAGACACA | 59 | 293 |
| 941598 | N/A | N/A | 2989 | 3008 | ACCCTTGTTAGCCACCTCCC | 55 | 294 |
| 941604 | N/A | N/A | 3222 | 3241 | GCGCCCTCTTCCCTAGGACC | 31 | 295 |
| 941610 | N/A | N/A | 3492 | 3511 | TACAGTCTCCAGCCCGTCCC | 30 | 296 |
| 941616 | N/A | N/A | 3854 | 3873 | GGCCCTGGCGATACCCGGCT | 17 | 297 |
| 941622 | N/A | N/A | 4209 | 4228 | GGTGCCGGGACCCCTTGGTC | 0 | 298 |
| 941628 | N/A | N/A | 4875 | 4894 | CGCCCATGTCTGGGATCCAC | 0 | 299 |
| 941634 | N/A | N/A | 5529 | 5548 | CCCCAGTCTATTACTCTTGC | 72 | 300 |
| 941640 | N/A | N/A | 5746 | 5765 | GTGCCGCCTGATGGCTTTCT | 37 | 301 |
| 941646 | N/A | N/A | 6201 | 6220 | TCTAGCCACTGCCGTGTTTC | 66 | 302 |
| 941652 | N/A | N/A | 7667 | 7686 | TGCTAATTCCTTCCACGGGA | 77 | 303 |
| 941658 | N/A | N/A | 8607 | 8626 | CCGAAATACACCTGGGATGG | 52 | 304 |
| 941664 | N/A | N/A | 9044 | 9063 | CTCGGGCAAGCCCGCCAGCC | 0 | 305 |
| 941670 | N/A | N/A | 9885 | 9904 | CCAGTAGGGACAAGGACTCG | 28 | 306 |
| 941676 | N/A | N/A | 10364 | 10383 | GGACAGCAGTCCGGTTAGAA | 10 | 307 |
| 941682 | N/A | N/A | 11039 | 11058 | CGTAGGCTAACATAAAGTGT | 44 | 308 |
| 941688 | N/A | N/A | 12316 | 12335 | GGAGTTGTAGTTCTCACCTT | 48 | 309 |
| 941694 | N/A | N/A | 12618 | 12637 | GCACAAGTATAAGTCTCCTC | 97 | 310 |
| 941700 | N/A | N/A | 13390 | 13409 | CCGAATACCCAGGTGCCCCC | 2 | 311 |
| 941706 | N/A | N/A | 14265 | 14284 | GGGATCCTGCCATACCCATT | 3 | 312 |
| 941712 | N/A | N/A | 14473 | 14492 | GCCGGAGCGAGGGCTGCTAA | 2 | 313 |
| 941718 | N/A | N/A | 15801 | 15820 | CGAGTTTGCTGTTCCTCAGA | 95 | 314 |
| 941724 | N/A | N/A | 16852 | 16871 | AGGACTTGTACTTGTCCTGC | 82 | 315 |
| 941730 | N/A | N/A | 17215 | 17234 | GGCTGGTAATTGGCCACCTC | 29 | 316 |
| 941736 | N/A | N/A | 18200 | 18219 | GGACCTCAGAATAGATCCCT | 16 | 317 |
| 941742 | N/A | N/A | 19311 | 19330 | GTAGAGGTGGAGCCGTGTGC | 7 | 318 |
| 941748 | N/A | N/A | 19574 | 19593 | GTTGTAGTTTTTTGGGCCCC | 0 | 319 |
| 941754 | N/A | N/A | 19964 | 19983 | GCTAGTGTGATAGGAAGTCC | 30 | 320 |
| 941760 | N/A | N/A | 21535 | 21554 | GTGTTTGGCAGGACCAATGT | 34 | 321 |
| 941766 | N/A | N/A | 21918 | 21937 | AGCACGCGCTGTAGCAGAAC | 36 | 322 |
| 941772 | N/A | N/A | 22564 | 22583 | ACCGCGACTCCTAATTATCA | 77 | 323 |
| 941778 | N/A | N/A | 24582 | 24601 | GTACGGACTTAGTCTATTTT | 47 | 324 |
| 941784 | N/A | N/A | 24737 | 24756 | GCGGGAAAGTCCATAGTTGG | 18 | 325 |
| 941790 | N/A | N/A | 25437 | 25456 | CCCGGCCTAGGTATTTCCAG | 13 | 326 |
| 941796 | N/A | N/A | 25823 | 25842 | GTTACTCTAGGATGGAGTGC | 36 | 327 |
| 941802 | N/A | N/A | 26218 | 26237 | GGTCCACTCACCGCATCCGC | 10 | 328 |

TABLE 6
Reduction of GYS1 RNA by 5-10-5 MOE gapmers in A431 cells

| | SEQ | SEQ | SEQ | SEQ | | | |
|---|---|---|---|---|---|---|---|
| | ID | ID | ID | ID | | | |
| | NO: 1 | NO: 1 | NO: 2 | NO: 2 | | | SEQ |
| Compound | Start | Stop | Start | Stop | | % | ID |
| Number | Site | Site | Site | Site | Sequence (5′ to 3′) | Reduction | No. |
| 941346 | 62 | 81 | 2709 | 2728 | CGTTGGGACCTAGGCAGAAG | 71 | 329 |
| 941352 | 120 | 139 | 2767 | 2786 | ACGGGAAGCTTGCAAGACGC | 48 | 330 |
| 941358 | 166 | 185 | 2813 | 2832 | TAGGGAATGCACCAGGTAGG | 76 | 331 |
| 941364 | 195 | 214 | 2842 | 2861 | GATCTCCAGGTAGGGACCCC | 41 | 332 |
| 941370 | 297 | 316 | 2944 | 2963 | CTCCAGGTCGAATTCATCCT | 77 | 333 |
| 941376 | 366 | 385 | 4524 | 4543 | CTGCAGCACCGTGTAGATGC | 37 | 334 |
| 941382 | 423 | 442 | 4581 | 4600 | CGGCCCCACCAGGAAGTAGT | 3 | 335 |
| 941388 | 436 | 455 | 4594 | 4613 | CCTGCTCCGTGTACGGCCCC | 25 | 336 |
| 941394 | 457 | 476 | 4615 | 4634 | GTTCCACCTGGGTCCTCACG | 60 | 337 |
| 941398 | 558 | 577 | 8632 | 8651 | AGGGCCTCCCTCGATCAGCC | 40 | 30 |
| 941401 | 641 | 660 | 8715 | 8734 | CCGATGTTGCAGGTATCCCA | 56 | 338 |
| 941407 | 778 | 797 | 10010 | 10029 | CGCCTGCCAACCACTCATGG | 0 | 339 |
| 941413 | 824 | 843 | 10056 | 10075 | ATGGTTGCTACAGGCAGTCG | 13 | 340 |
| 941419 | 891 | 910 | 10123 | 10142 | GTTGTTGTAGAAGTCCACGG | 42 | 341 |
| 941425 | 1015 | 1034 | 10491 | 10510 | CGATGGCGGTGATCTGGGAC | 71† | 342 |
| 941431 | 1033 | 1052 | 10509 | 10528 | TGAGCAAGTGCTGTGCCTCG | 67† | 343 |
| 941437 | 1191 | 1210 | 13634 | 13653 | GGTCTTGTCCAAGTTGAAGT | 74 | 344 |
| 941443 | 1219 | 1238 | 13662 | 13681 | CATAGCGGCCGGCGATAAAG | 38 | 345 |
| 941449 | 1228 | 1247 | 13671 | 13690 | TGGAGAACTCATAGCGGCCG | 0 | 346 |
| 941455 | 1304 | 1323 | 14365 | 14384 | GTCTGCTCGCTGCCGTTCAC | 65 | 347 |
| 941461 | 1380 | 1399 | 14441 | 14460 | GCGCACAGCTTGGCCTTTGA | 69 | 348 |
| 941467 | 1608 | 1627 | 21326 | 21345 | TCGGCGGATGGTGGTCAGGA | 36 | 349 |
| 941473 | 1647 | 1666 | 21365 | 21384 | CACCTTCACCCTGTCGGCAC | 10 | 350 |
| 941479 | 1771 | 1790 | 21769 | 21788 | CCGGTGTGTAGCCCCAAGGC | 26 | 351 |
| 941485 | 1854 | 1873 | 25041 | 25060 | GTCTGCGATGTGTTCCTCCA | 79 | 352 |
| 941491 | 1905 | 1924 | 25310 | 25329 | ATCCAGGCTGCGGAACCGCC | 0 | 353 |
| 941497 | 1961 | 1980 | 25366 | 25385 | CGCCGGCTCTGCTGACAGAA | 30 | 354 |
| 941503 | 1990 | 2009 | 25395 | 25414 | CCGTGCGGTTCCGCTGGATG | 0 | 355 |
| 941509 | 2059 | 2078 | 26154 | 26173 | GCGCCATGTGGCGCGCAGAC | 0 | 356 |
| 941515 | 2146 | 2165 | 26404 | 26423 | CCGAGGCTGGCCGTGGGTAG | 30 | 357 |
| 941521 | 2189 | 2208 | 26447 | 26466 | TGGTGCGGGCTGGAGTGTCG | 18 | 358 |
| 941527 | 2277 | 2296 | 26535 | 26554 | CCGGTCCTTGGCGGCCTCCT | 0 | 359 |
| 941533 | 2309 | 2328 | 26567 | 26586 | CGGCGCGGCCACTCTGGTGC | 20 | 360 |
| 941539 | 2358 | 2377 | 26616 | 26635 | GTCCACAGAGTTGCGCTTGC | 56 | 361 |
| 941545 | 2440 | 2459 | 26698 | 26717 | GGACTTAGTTACGCTCCTCG | 50 | 362 |
| 941551 | 2577 | 2596 | 26835 | 26854 | GGAGTGTTTGGCGGACTGGG | 55 | 363 |
| 941557 | 2741 | 2760 | 26999 | 27018 | ACCTCTGGCACCACCGCAGA | 70 | 364 |
| 941563 | 2873 | 2892 | 27131 | 27150 | CGTGGTTTCCAGAACTTGGT | 91 | 365 |
| 941569 | 2914 | 2933 | 27172 | 27191 | CCCCGGCTCTGGACTTGATC | 28 | 366 |
| 941575 | 3002 | 3021 | 27260 | 27279 | GAGGGCTAGAACATCCCTCC | 8 | 367 |
| 941581 | 3222 | 3241 | 27480 | 27499 | CGGATTCCCTGGAGGGAGAT | 74 | 368 |
| 941587 | 3329 | 3348 | 27587 | 27606 | GATCTAGAAGCCAGGACCTA | 39 | 369 |
| 941593 | 3514 | 3533 | 27772 | 27791 | GCAAACCAAGCGGTGCAGAC | 60 | 370 |
| 941599 | N/A | N/A | 2993 | 3012 | GCTCACCCTTGTTAGCCACC | 0 | 371 |
| 941605 | N/A | N/A | 3278 | 3297 | ACCCAGGTATCTAGTCTCTC | 96 | 372 |
| 941611 | N/A | N/A | 3577 | 3596 | ACGCATGTGTCCCAGGCCAT | 89 | 373 |
| 941617 | N/A | N/A | 3950 | 3969 | GACTAGGGACACCAGCATGC | 77 | 374 |
| 941623 | N/A | N/A | 4370 | 4389 | GGGAGCCCATAGTTTGGAGT | 37 | 375 |
| 941629 | N/A | N/A | 4932 | 4951 | TTGGCCTCTTGGATCTCCGT | 75 | 376 |
| 941635 | N/A | N/A | 5599 | 5618 | CCCCGATATTCCATGCTTCT | 84 | 377 |
| 941641 | N/A | N/A | 5747 | 5766 | CGTGCCGCCTGATGGCTTTC | 22 | 378 |
| 941647 | N/A | N/A | 6270 | 6289 | ACCGCCCTCGGCCACGCCAC | 38 | 379 |
| 941653 | N/A | N/A | 8366 | 8385 | TTCCGTGCCCCCTGCTTACT | 86 | 380 |
| 941659 | N/A | N/A | 8610 | 8629 | CGCCCGAAATACACCTGGGA | 21 | 381 |
| 941665 | N/A | N/A | 9550 | 9569 | GCCATAGGAGCAGCCAGTTC | 38 | 382 |
| 941671 | N/A | N/A | 9927 | 9946 | GGCCACTGTCTCCACGAGTG | 25 | 383 |
| 941677 | N/A | N/A | 10576 | 10595 | GGCATAGACAGCTGCCTACC | 4 | 384 |
| 941683 | N/A | N/A | 12006 | 12025 | CTTAGGACTTAGGATGGTCC | 39 | 385 |
| 941689 | N/A | N/A | 12386 | 12405 | ACTACAACCCCCATCAGCGC | 35 | 386 |
| 941695 | N/A | N/A | 12654 | 12673 | GCCTTCTTGCCTAATATTAC | 89 | 387 |
| 941701 | N/A | N/A | 13497 | 13516 | TAATACAGAGGCATCACGGG | 49 | 388 |
| 941707 | N/A | N/A | 14361 | 14380 | GCTCGCTGCCGTTCACCTGC | 0 | 389 |
| 941713 | N/A | N/A | 14474 | 14493 | GGCCGGAGCGAGGGCTGCTA | 0 | 390 |
| 941719 | N/A | N/A | 15846 | 15865 | CCCCATGGGACTCCCCACCG | 49 | 391 |
| 941725 | N/A | N/A | 16855 | 16874 | ATTAGGACTTGTACTTGTCC | 39 | 392 |
| 941731 | N/A | N/A | 17784 | 17803 | GCCATTTACTGTTAGGCTTC | 39 | 393 |
| 941737 | N/A | N/A | 18262 | 18281 | CCCACCCTAAGTGCCTCGCC | 0 | 394 |
| 941743 | N/A | N/A | 19377 | 19396 | TTGCTCACCTCCTGACTGCG | 0 | 395 |
| 941749 | N/A | N/A | 19577 | 19596 | GGAGTTGTAGTTTTTTGGGC | 46 | 396 |
| 941755 | N/A | N/A | 20410 | 20429 | GACTGTGCCAATATGGCAGC | 41 | 397 |
| 941761 | N/A | N/A | 21618 | 21637 | GCCCAAGTGCCTTATTTAGC | 27 | 398 |
| 941767 | N/A | N/A | 21986 | 22005 | CATCCAGTTCACTAGTCCTC | 41 | 399 |
| 941773 | N/A | N/A | 22569 | 22588 | GGCTGACCGCGACTCCTAAT | 46 | 400 |
| 941779 | N/A | N/A | 24594 | 24613 | TGCCAGTATCTTGTACGGAC | 59 | 401 |
| 941785 | N/A | N/A | 24835 | 24854 | GTCGCTGAGCCCCCACAACC | 41 | 402 |
| 941791 | N/A | N/A | 25445 | 25464 | GGGTCCTACCCGGCCTAGGT | 0 | 403 |
| 941797 | N/A | N/A | 25899 | 25918 | TCTTTGGCCACACCCTTATG | 49 | 404 |
| 941803 | N/A | N/A | 26386 | 26405 | AGCGGTACCCCTGGGCCTGC | 22 | 405 |

TABLE 7
Reduction of GYS1 RNA by 5-10-5 MOE gapmers in A431 cells

| | SEQ | SEQ | SEQ | SEQ | | | |
|---|---|---|---|---|---|---|---|
| | ID | ID | ID | ID | | | |
| | NO: 1 | NO: 1 | NO: 2 | NO: 2 | | | SEQ |
| Compound | Start | Stop | Start | Stop | | % | ID |
| Number | Site | Site | Site | Site | Sequence (5′ to 3′) | Reduction | No. |
| 941347 | 80 | 99 | 2727 | 2746 | CGCACCCCTGCCCCGAAGCG | 0 | 406 |
| 941353 | 124 | 143 | 2771 | 2790 | CCCGACGGGAAGCTTGCAAG | 0 | 407 |
| 941359 | 169 | 188 | 2816 | 2835 | GTCTAGGGAATGCACCAGGT | 95 | 408 |
| 941365 | 231 | 250 | 2878 | 2897 | TAAAGGCATGGCTGGCGCAG | 42 | 409 |
| 941371 | 301 | 320 | 2948 | 2967 | CGTTCTCCAGGTCGAATTCA | 87 | 410 |
| 941377 | 369 | 388 | 4527 | 4546 | CGTCTGCAGCACCGTGTAGA | 42 | 411 |
| 941383 | 426 | 445 | 4584 | 4603 | GTACGGCCCCACCAGGAAGT | 32 | 412 |
| 941389 | 437 | 456 | 4595 | 4614 | CCCTGCTCCGTGTACGGCCC | 16 | 413 |
| 941395 | 507 | 526 | 4665 | 4684 | GTTCATGGAATCCAGTGTCC | 68 | 414 |
| 941398 | 558 | 577 | 8632 | 8651 | AGGGCCTCCCTCGATCAGCC | 40 | 30 |
| 941402 | 642 | 661 | 8716 | 8735 | TCCGATGTTGCAGGTATCCC | 58 | 415 |
| 941408 | 804 | 823 | 10036 | 10055 | CCGGGCACGACACAGGCAGA | 47 | 416 |
| 941414 | 843 | 862 | 10075 | 10094 | CGTGGCATGGGTGGTGAAGA | 41 | 417 |
| 941420 | 964 | 983 | 10440 | 10459 | CCGCCCTTTCCATGCAGTAT | 55 | 418 |
| 941426 | 1018 | 1037 | 10494 | 10513 | CCTCGATGGCGGTGATCTGG | 88† | 419 |
| 941432 | 1130 | 1149 | 13229 | 13248 | CGAGCCTTGCTCTGAGCATG | 73† | 420 |
| 941438 | 1197 | 1216 | 13640 | 13659 | GTATAAGGTCTTGTCCAAGT | 91 | 421 |
| 941444 | 1220 | 1239 | 13663 | 13682 | TCATAGCGGCCGGCGATAAA | 23 | 422 |
| 941450 | 1231 | 1250 | 13674 | 13693 | TGTTGGAGAACTCATAGCGG | 79 | 423 |
| 941456 | 1309 | 1328 | 14370 | 14389 | CCACTGTCTGCTCGCTGCCG | 66 | 424 |
| 941462 | 1410 | 1429 | 17843 | 17862 | CACCGTGTTGGCCGTGTCCC | 79 | 425 |
| 941468 | 1614 | 1633 | 21332 | 21351 | GCCGATTCGGCGGATGGTGG | 4 | 426 |
| 941474 | 1671 | 1690 | 21669 | 21688 | GGAGAGGAACTCCGGGTGGA | 45 | 427 |
| 941480 | 1791 | 1810 | 24978 | 24997 | TCCCATAACCGTGCACTCAG | 43 | 428 |
| 941486 | 1855 | 1874 | 25042 | 25061 | GGTCTGCGATGTGTTCCTCC | 49 | 429 |
| 941492 | 1906 | 1925 | 25311 | 25330 | CATCCAGGCTGCGGAACCGC | 0 | 430 |
| 941498 | 1964 | 1983 | 25369 | 25388 | TGCCGCCGGCTCTGCTGACA | 21 | 431 |
| 941504 | 1995 | 2014 | 25400 | 25419 | GCGCTCCGTGCGGTTCCGCT | 0 | 432 |
| 941510 | 2075 | 2094 | 26170 | 26189 | GGAAAGGCCTTGGACAGCGC | 32 | 433 |
| 941516 | 2152 | 2171 | 26410 | 26429 | GTGGCACCGAGGCTGGCCGT | 29 | 434 |
| 941522 | 2199 | 2218 | 26457 | 26476 | GTCCTCACTCTGGTGCGGGC | 17 | 435 |
| 941528 | 2280 | 2299 | 26538 | 26557 | GCGCCGGTCCTTGGCGGCCT | 21 | 436 |
| 941534 | 2312 | 2331 | 26570 | 26589 | GCTCGGCGCGGCCACTCTGG | 55 | 437 |
| 941540 | 2361 | 2380 | 26619 | 26638 | CGTGTCCACAGAGTTGCGCT | 0 | 438 |
| 941546 | 2443 | 2462 | 26701 | 26720 | GGCGGACTTAGTTACGCTCC | 0 | 439 |
| 941552 | 2581 | 2600 | 26839 | 26858 | GGGTGGAGTGTTTGGCGGAC | 63 | 440 |
| 941558 | 2832 | 2851 | 27090 | 27109 | CGTGGCCTGCTCTGTATGCT | 80 | 441 |
| 941564 | 2894 | 2913 | 27152 | 27171 | GCCCCATTCGCAGGGACACC | 65 | 442 |
| 941570 | 2917 | 2936 | 27175 | 27194 | GTGCCCCGGCTCTGGACTTG | 40 | 443 |
| 941576 | 3050 | 3069 | 27308 | 27327 | GCCGGATGGAGGGATCCTCC | 39 | 444 |
| 941582 | 3233 | 3252 | 27491 | 27510 | TCCTCTGCAGGCGGATTCCC | 31 | 445 |
| 941588 | 3344 | 3363 | 27602 | 27621 | CGTGGTAAGGTTCCAGATCT | 79 | 446 |
| 941594 | 3521 | 3540 | 27779 | 27798 | CTCAACTGCAAACCAAGCGG | 67 | 447 |
| 941600 | N/A | N/A | 2995 | 3014 | GTGCTCACCCTTGTTAGCCA | 37 | 448 |
| 941606 | N/A | N/A | 3288 | 3307 | CCTGTTCAGGACCCAGGTAT | 6 | 449 |
| 941612 | N/A | N/A | 3593 | 3612 | CTTCCCCTATTCCAGTACGC | 92 | 450 |
| 941618 | N/A | N/A | 4015 | 4034 | AAGCCTGCATGGTCATTCCC | 36 | 451 |
| 941624 | N/A | N/A | 4466 | 4485 | GCCGAGGTCCATAGTTCTGG | 51 | 452 |
| 941630 | N/A | N/A | 4982 | 5001 | GACCAGGCTGTCTTTCGATC | 97 | 453 |
| 941636 | N/A | N/A | 5600 | 5619 | TCCCCGATATTCCATGCTTC | 77 | 454 |
| 941642 | N/A | N/A | 5789 | 5808 | CCCTTAGCCCTGCCGCCTGA | 50 | 455 |
| 941648 | N/A | N/A | 7007 | 7026 | CTGTCACCTGCGACCTCTTT | 85 | 456 |
| 941654 | N/A | N/A | 8503 | 8522 | CTATAGACTTAAGCCTCAGC | 85 | 457 |
| 941660 | N/A | N/A | 8611 | 8630 | GCGCCCGAAATACACCTGGG | 2 | 458 |
| 941666 | N/A | N/A | 9601 | 9620 | GGGTACGCTGTCTGCACCCA | 57 | 459 |
| 941672 | N/A | N/A | 10161 | 10180 | GTCCCCCATCTGCCACGGTC | 29 | 460 |
| 941678 | N/A | N/A | 10639 | 10658 | CGTTTTCGGTTTATGCTATT | 80 | 461 |
| 941684 | N/A | N/A | 12014 | 12033 | GTCCCCAGCTTAGGACTTAG | 32 | 462 |
| 941690 | N/A | N/A | 12448 | 12467 | AGCTTCTTACAGGGACCCAA | 81 | 463 |
| 941696 | N/A | N/A | 13029 | 13048 | CGTTCCTATGAGGTCCCCCC | 50 | 464 |
| 941702 | N/A | N/A | 13575 | 13594 | AAGCCCTCACCCGCTAGCCC | 0 | 465 |
| 941708 | N/A | N/A | 14457 | 14476 | CTAACCAAAGCTGTTTGCGC | 27 | 466 |
| 941714 | N/A | N/A | 15444 | 15463 | CTCTGCTAATGAATGAACGG | 93 | 467 |
| 941720 | N/A | N/A | 16573 | 16592 | GCGCAATCTCGGCCACTTTC | 56 | 468 |
| 941726 | N/A | N/A | 16861 | 16880 | GCTATTATTAGGACTTGTAC | 95 | 469 |
| 941732 | N/A | N/A | 17841 | 17860 | CCGTGTTGGCCGTGTCCCTG | 69 | 470 |
| 941738 | N/A | N/A | 18862 | 18881 | GGCTAGTGTGGGATCTGGCT | 61 | 471 |
| 941744 | N/A | N/A | 19426 | 19445 | CCGCAGCTGCTGAGAGTTTG | 6 | 472 |
| 941750 | N/A | N/A | 19678 | 19697 | TACTGAAGTCCCTGGACCCC | 9 | 473 |
| 941756 | N/A | N/A | 20537 | 20556 | AGCCGTGTTAGCAACTCCCT | 47 | 474 |
| 941762 | N/A | N/A | 21657 | 21676 | CGGGTGGAAAATCACCTGGT | 13 | 475 |
| 941768 | N/A | N/A | 22082 | 22101 | GACTTGGCCACACTCGGCTG | 23 | 476 |
| 941774 | N/A | N/A | 22629 | 22648 | CAGACTAGTACTATCTATCA | 37 | 477 |
| 941780 | N/A | N/A | 24653 | 24672 | GGATCGGGCCAAGGTCCATC | 21 | 478 |
| 941786 | N/A | N/A | 24892 | 24911 | CGCCTCAACACCGCCCTCTA | 0 | 479 |
| 941792 | N/A | N/A | 25496 | 25515 | AAGACCCCTAGCCAGGAGCT | 25 | 480 |
| 941798 | N/A | N/A | 25942 | 25961 | GCCATACCCCTCAAACAGGG | 38 | 481 |
| 941804 | N/A | N/A | 27870 | 27889 | GTCTGACCACACCTGGGATT | 64 | 482 |

### Example 2: Effect of 5-10-5 MOE Gapmer Modified Oligonucleotides on Human GYS1 RNA In Vitro, Single Dose

[0609] Modified oligonucleotides complementary to human GYS1 nucleic acid were designed and tested for their single dose effects on GYS1 RNA in vitro. The modified oligonucleotides were tested in a series of experiments that had the same culture conditions.

[0610] The modified oligonucleotides in the tables below are 5-10-5 MOE gapmers. The gapmers are 20 nucleosides in length, wherein the central gap segment consists of ten 2′-β-D-deoxynucleosides and the 5′ and 3′ wing segments each consists of five 2′-MOE modified nucleosides. The sugar motif for the gapmers is (from 5′ to 3′): ceeeeeddddddddddeeeee; wherein ‘d’ represents a 2′-β-D-deoxyribosyl sugar moiety, and ‘e’ represents a 2′-O(CH₂)₂OCH₃ ribosyl sugar moiety. The internucleoside linkage motif for the gapmers is (from 5′ to 3′): sooosssssssssssooss; wherein each ‘o’ represents a phosphodiester internucleoside linkage and each ‘s’ represents a phosphorothioate internucleoside linkage. Each cytosine residue is a 5-methylcytosine.

[0611] “Start site” indicates the 5′-most nucleoside to which the modified oligonucleotide is complementary in the target nucleic acid sequence. “Stop site” indicates the 3′-most nucleoside to which the modified oligonucleotide is complementary in the target nucleic acid sequence. Each modified oligonucleotide listed in the Tables below is 100% complementary to SEQ ID NO: 1 (described herein above), or SEQ ID NO: 2 (described herein above). ‘N/A’ indicates that the modified oligonucleotide is not 100% complementary to that particular target nucleic acid sequence.

[0612] Cultured A431 cells were treated with modified oligonucleotide at a concentration of 4,000 nM using free uptake at a density of 10,000 cells per well. After a treatment period of approximately 48 hours, total RNA was isolated from the cells and GYS1 RNA levels were measured by quantitative real-time RTPCR. GYS1 RNA levels were measured by Human GYS1 primer probe set RTS36346 (described herein above). GYS1 RNA levels were normalized to total RNA content, as measured by RIBOGREEN®. Results are presented as percent reduction of GYS1 relative to the amount of GYS1 RNA in untreated control cells (% reduction). As used herein, a value of ‘0’ indicates that treatment with the modified oligonucleotide did not reduce GYS1 RNA levels. Each table represents results from an individual assay plate. The values marked with the symbol “†” indicate that the modified oligonucleotide is complementary to the amplicon region of the primer probe set.

TABLE 8
Reduction of GYS1 RNA by 5-10-5 MOE gapmers in A431 cells

| | SEQ | SEQ | SEQ | SEQ | | | |
|---|---|---|---|---|---|---|---|
| | ID | ID | ID | ID | | | |
| | NO: 1 | NO: 1 | NO: 2 | NO: 2 | | | SEQ |
| Compound | Start | Stop | Start | Stop | | % | ID |
| Number | Site | Site | Site | Site | Sequence (5′ to 3′) | Reduction | No. |
| 1126247 | 1 | 20 | 2648 | 2667 | AAACCTCGCAGCCGCCAGGA | 0 | 483 |
| 1126279 | 127 | 146 | 2774 | 2793 | GTGCCCGACGGGAAGCTTGC | 0 | 484 |
| 1126311 | 193 | 212 | 2840 | 2859 | TCTCCAGGTAGGGACCCCGG | 5 | 485 |
| 1126343 | 364 | 383 | 4522 | 4541 | GCAGCACCGTGTAGATGCCA | 0 | 486 |
| 1126375 | 640 | 659 | 8714 | 8733 | CGATGTTGCAGGTATCCCAG | 37 | 487 |
| 1126407 | 822 | 841 | 10054 | 10073 | GGTTGCTACAGGCAGTCGCC | 0 | 488 |
| 1126439 | 970 | 989 | 10446 | 10465 | GGGCTGCCGCCCTTTCCATG | 0 | 489 |
| 1126471 | 1150 | 1169 | 13249 | 13268 | CCCGCACAAACTCCTGGATT | 0 | 490 |
| 1126503 | 1284 | 1303 | 13727 | 13746 | TCTGAGCAGATAGTTGAGCC | 21 | 491 |
| 1126535 | 1434 | 1453 | 17867 | 17886 | AAGCTTCCTCCCGAACTTTT | 30 | 492 |
| 1126567 | 1611 | 1630 | 21329 | 21348 | GATTCGGCGGATGGTGGTCA | 13 | 493 |
| 1126599 | 1717 | 1736 | 21715 | 21734 | CACGGACAAACTCCTCATAG | 3 | 494 |
| 1126631 | 1901 | 1920 | 25306 | 25325 | AGGCTGCGGAACCGCCGGTC | 0 | 495 |
| 1126663 | 1987 | 2006 | 25392 | 25411 | TGCGGTTCCGCTGGATGATA | 0 | 496 |
| 1126695 | 2160 | 2179 | 26418 | 26437 | GGGCGACGGTGGCACCGAGG | 0 | 497 |
| 1126727 | 2295 | 2314 | 26553 | 26572 | TGGTGCACGGATGTTGCGCC | 0 | 498 |
| 1126759 | 2436 | 2455 | 26694 | 26713 | TTAGTTACGCTCCTCGCCCA | 0 | 499 |
| 1126791 | 2731 | 2750 | 26989 | 27008 | CCACCGCAGAGTAATGGCAG | 50 | 500 |
| 1126823 | 2893 | 2912 | 27151 | 27170 | CCCCATTCGCAGGGACACCA | 1 | 501 |
| 1126855 | 2964 | 2983 | 27222 | 27241 | GTTGAAATGGAGGACCATCT | 57 | 502 |
| 1126887 | 3284 | 3303 | 27542 | 27561 | GAGCAGTTGGGAATAAGCCA | 54 | 503 |
| 1126919 | 3516 | 3535 | 27774 | 27793 | CTGCAAACCAAGCGGTGCAG | 0 | 504 |
| 1126951 | N/A | N/A | 3060 | 3079 | TACAACTCAGAGTTCCGGGC | 37 | 505 |
| 1126983 | N/A | N/A | 3172 | 3191 | TTAAGTCAAACGAACCATCC | 0 | 506 |
| 1127015 | N/A | N/A | 3330 | 3349 | TCCCAGGTTTGCACGCAGAA | 90 | 507 |
| 1127047 | N/A | N/A | 3376 | 3395 | CCCTAGACCATGCTGTTAGG | 9 | 508 |
| 1127079 | N/A | N/A | 3537 | 3556 | ACTAATAGCTCAGGCCCTCA | 20 | 509 |
| 1127111 | N/A | N/A | 3622 | 3641 | AGCCTCTGACTAACTTAGGA | 47 | 510 |
| 1127143 | N/A | N/A | 4066 | 4085 | GTGAGGGAGACCCCCTCATG | 0 | 511 |
| 1127175 | N/A | N/A | 4204 | 4223 | CGGGACCCCTTGGTCTGAAG | 3 | 512 |
| 1127207 | N/A | N/A | 4731 | 4750 | CCGATGGCAGGCTGTCCACC | 6 | 513 |
| 1127239 | N/A | N/A | 4922 | 4941 | GGATCTCCGTCTCAGTCTGT | 70 | 514 |
| 1127271 | N/A | N/A | 5406 | 5425 | CCGCCCACACAATGTGCTAC | 11 | 515 |
| 1127303 | N/A | N/A | 5782 | 5801 | CCCTGCCGCCTGATGGCTTT | 8 | 516 |
| 1127335 | N/A | N/A | 5928 | 5947 | AGGAAGCGACTGGGCTGTTC | 80 | 517 |
| 1127367 | N/A | N/A | 6222 | 6241 | CGTGCCCCAGGGCTGCATTT | 0 | 518 |
| 1127399 | N/A | N/A | 7225 | 7244 | GGCACAAGGTATCACATCCC | 88 | 519 |
| 1127431 | N/A | N/A | 8377 | 8396 | GTTGCAATATTTTCCGTGCC | 86 | 520 |
| 1127463 | N/A | N/A | 8831 | 8850 | TTGTAGTTTCAGGTATGGGT | 85 | 521 |
| 1127495 | N/A | N/A | 8966 | 8985 | GGCATCGAGAGTAGAGCCTG | 0 | 522 |
| 1127527 | N/A | N/A | 9055 | 9074 | TCCTAGAATTCCTCGGGCAA | 32 | 523 |
| 1127559 | N/A | N/A | 9606 | 9625 | CTCAAGGGTACGCTGTCTGC | 45 | 524 |
| 1127591 | N/A | N/A | 9691 | 9710 | CATCTAAGTCCTGGCAGGGT | 22 | 525 |
| 1127623 | N/A | N/A | 9816 | 9835 | CTGCAGCAATCCCAACCGGA | 6 | 526 |
| 1127655 | N/A | N/A | 9908 | 9927 | GTTGGGAAAAGAATCGGCAA | 14 | 527 |
| 1127687 | N/A | N/A | 10182 | 10201 | GGTTTTCCTGGCATACTCGC | 39 | 528 |
| 1127719 | N/A | N/A | 11634 | 11653 | TACATCCACATGAGTCCAAT | 72 | 529 |
| 1127751 | N/A | N/A | 12120 | 12139 | GCCTCCAGAGTATATAGTCA | 38 | 530 |
| 1127783 | N/A | N/A | 12343 | 12362 | TAGAGCTAACCAGTCAAAGG | 56 | 531 |
| 1127815 | N/A | N/A | 12612 | 12631 | GTATAAGTCTCCTCAGCTAC | 57 | 532 |
| 1127847 | N/A | N/A | 13323 | 13342 | CCTAGATGGTTAGGCTCCCA | 53 | 533 |
| 1127879 | N/A | N/A | 13511 | 13530 | GAGGATGTCTTAGGTAATAC | 83 | 534 |
| 1127911 | N/A | N/A | 13787 | 13806 | TCTCCCTAGTTATAAACTGC | 31 | 535 |
| 1127943 | N/A | N/A | 14363 | 14382 | CTGCTCGCTGCCGTTCACCT | 31 | 536 |
| 1127954 | N/A | N/A | 15654 | 15673 | CCGTCTACAGGATTTTCTAG | 95 | 83 |
| 1127976 | N/A | N/A | 15713 | 15732 | TGTCCTGACAACCCCGTCTC | 14 | 537 |
| 1128008 | N/A | N/A | 16755 | 16774 | AGCTAGCAGTGTCACACAAC | 40 | 538 |
| 1128040 | N/A | N/A | 16927 | 16946 | GTTTGCGATGAGGACCCAAT | 93 | 539 |
| 1128072 | N/A | N/A | 17220 | 17239 | CCTCTGGCTGGTAATTGGCC | 14 | 540 |
| 1128104 | N/A | N/A | 18075 | 18094 | AGAGGTCCAATCCATACCTG | 18 | 541 |
| 1128136 | N/A | N/A | 18258 | 18277 | CCCTAAGTGCCTCGCCTCCA | 14 | 542 |
| 1128168 | N/A | N/A | 19347 | 19366 | GGCCCGATAAAACTACCACT | 25 | 543 |
| 1128200 | N/A | N/A | 19556 | 19575 | CCTAGACTCAATAGAATGAC | 20 | 544 |
| 1128232 | N/A | N/A | 19735 | 19754 | ACTTAGCTGTCTGGGTTTCC | 32 | 545 |
| 1128264 | N/A | N/A | 19843 | 19862 | ACAACTCCCAGCATCCCGAT | 17 | 546 |
| 1128296 | N/A | N/A | 21098 | 21117 | ATTCCCACTAGTACAACCTG | 19 | 547 |
| 1128328 | N/A | N/A | 21560 | 21579 | AAGCTTGTCTAGCATCACAC | 33 | 548 |
| 1128360 | N/A | N/A | 21810 | 21829 | AGGATGCCATGACCACGCTG | 37 | 549 |
| 1128392 | N/A | N/A | 21915 | 21934 | ACGCGCTGTAGCAGAACAGG | 27 | 550 |
| 1128424 | N/A | N/A | 22081 | 22100 | ACTTGGCCACACTCGGCTGT | 7 | 551 |
| 1128456 | N/A | N/A | 22881 | 22900 | GGTTCCCCCGCCGCTGTTCT | 2 | 552 |
| 1128488 | N/A | N/A | 24647 | 24666 | GGCCAAGGTCCATCATTCTA | 14 | 553 |
| 1128520 | N/A | N/A | 24745 | 24764 | TCCAAGATGCGGGAAAGTCC | 28 | 554 |
| 1128552 | N/A | N/A | 24925 | 24944 | TCCCTCATCGCCTACCGTCT | 5 | 555 |
| 1128584 | N/A | N/A | 25190 | 25209 | CCTCTCCCAGCGGCCCGAGA | 15 | 556 |
| 1128616 | N/A | N/A | 25564 | 25583 | CGGCCTGGTTCATTGCTTAA | 14 | 557 |
| 1128648 | N/A | N/A | 25944 | 25963 | GAGCCATACCCCTCAAACAG | 21 | 558 |
| 1128680 | N/A | N/A | 26247 | 26266 | CTTTAGCTCCTGGCTAAGCA | 3 | 559 |

TABLE 9
Reduction of GYS1 RNA by 5-10-5 MOE gapmers in A431 cells

| | SEQ | SEQ | SEQ | SEQ | | | |
|---|---|---|---|---|---|---|---|
| | ID | ID | ID | ID | | | |
| | NO: 1 | NO: 1 | NO: 2 | NO: 2 | | | SEQ |
| Compound | Start | Stop | Start | Stop | | % | ID |
| Number | Site | Site | Site | Site | Sequence (5′ to 3′) | Reduction | No. |
| 1126248 | 3 | 22 | 2650 | 2669 | TGAAACCTCGCAGCCGCCAG | 0 | 560 |
| 1126280 | 129 | 148 | 2776 | 2795 | TGGTGCCCGACGGGAAGCTT | 2 | 561 |
| 1126312 | 194 | 213 | 2841 | 2860 | ATCTCCAGGTAGGGACCCCG | 15 | 562 |
| 1126344 | 365 | 384 | 4523 | 4542 | TGCAGCACCGTGTAGATGCC | 0 | 563 |
| 1126376 | 643 | 662 | 8717 | 8736 | CTCCGATGTTGCAGGTATCC | 28 | 564 |
| 1126408 | 823 | 842 | 10055 | 10074 | TGGTTGCTACAGGCAGTCGC | 0 | 565 |
| 1126440 | 971 | 990 | 10447 | 10466 | TGGGCTGCCGCCCTTTCCAT | 0 | 566 |
| 1126472 | 1152 | 1171 | 13251 | 13270 | GCCCCGCACAAACTCCTGGA | 0 | 567 |
| 1126504 | 1285 | 1304 | 13728 | 13747 | CTCTGAGCAGATAGTTGAGC | 9 | 568 |
| 1126536 | 1435 | 1454 | 17868 | 17887 | AAAGCTTCCTCCCGAACTTT | 20 | 569 |
| 1126568 | 1612 | 1631 | 21330 | 21349 | CGATTCGGCGGATGGTGGTC | 21 | 570 |
| 1126600 | 1718 | 1737 | 21716 | 21735 | CCACGGACAAACTCCTCATA | 1 | 571 |
| 1126632 | 1902 | 1921 | 25307 | 25326 | CAGGCTGCGGAACCGCCGGT | 0 | 572 |
| 1126664 | 1988 | 2007 | 25393 | 25412 | GTGCGGTTCCGCTGGATGAT | 0 | 573 |
| 1126696 | 2161 | 2180 | 26419 | 26438 | AGGGCGACGGTGGCACCGAG | 0 | 574 |
| 1126728 | 2296 | 2315 | 26554 | 26573 | CTGGTGCACGGATGTTGCGC | 0 | 575 |
| 1126760 | 2438 | 2457 | 26696 | 26715 | ACTTAGTTACGCTCCTCGCC | 24 | 576 |
| 1126792 | 2732 | 2751 | 26990 | 27009 | ACCACCGCAGAGTAATGGCA | 64 | 577 |
| 1126824 | 2896 | 2915 | 27154 | 27173 | TCGCCCCATTCGCAGGGACA | 0 | 578 |
| 1126856 | 2965 | 2984 | 27223 | 27242 | AGTTGAAATGGAGGACCATC | 59 | 579 |
| 1126888 | 3304 | 3323 | 27562 | 27581 | TAGTGGTTTCACAGTGGGCA | 90 | 580 |
| 1126920 | 3517 | 3536 | 27775 | 27794 | ACTGCAAACCAAGCGGTGCA | 6 | 581 |
| 1126952 | N/A | N/A | 3061 | 3080 | CTACAACTCAGAGTTCCGGG | 40 | 582 |
| 1126984 | N/A | N/A | 3173 | 3192 | CTTAAGTCAAACGAACCATC | 30 | 583 |
| 1127016 | N/A | N/A | 3331 | 3350 | TTCCCAGGTTTGCACGCAGA | 87 | 584 |
| 1127048 | N/A | N/A | 3377 | 3396 | CCCCTAGACCATGCTGTTAG | 32 | 585 |
| 1127080 | N/A | N/A | 3538 | 3557 | AACTAATAGCTCAGGCCCTC | 35 | 586 |
| 1127112 | N/A | N/A | 3623 | 3642 | CAGCCTCTGACTAACTTAGG | 52 | 587 |
| 1127144 | N/A | N/A | 4067 | 4086 | AGTGAGGGAGACCCCCTCAT | 6 | 588 |
| 1127176 | N/A | N/A | 4205 | 4224 | CCGGGACCCCTTGGTCTGAA | 21 | 589 |
| 1127208 | N/A | N/A | 4732 | 4751 | CCCGATGGCAGGCTGTCCAC | 14 | 590 |
| 1127240 | N/A | N/A | 4923 | 4942 | TGGATCTCCGTCTCAGTCTG | 70 | 591 |
| 1127272 | N/A | N/A | 5407 | 5426 | ACCGCCCACACAATGTGCTA | 20 | 592 |
| 1127304 | N/A | N/A | 5785 | 5804 | TAGCCCTGCCGCCTGATGGC | 43 | 593 |
| 1127336 | N/A | N/A | 5929 | 5948 | CAGGAAGCGACTGGGCTGTT | 65 | 594 |
| 1127368 | N/A | N/A | 6232 | 6251 | ATCCTCTGTCCGTGCCCCAG | 56 | 595 |
| 1127400 | N/A | N/A | 7380 | 7399 | GCCACCTAAAGCAGGCCCTT | 34 | 596 |
| 1127432 | N/A | N/A | 8378 | 8397 | TGTTGCAATATTTTCCGTGC | 97 | 597 |
| 1127464 | N/A | N/A | 8832 | 8851 | ATTGTAGTTTCAGGTATGGG | 89 | 598 |
| 1127496 | N/A | N/A | 8967 | 8986 | TGGCATCGAGAGTAGAGCCT | 15 | 599 |
| 1127528 | N/A | N/A | 9056 | 9075 | CTCCTAGAATTCCTCGGGCA | 18 | 600 |
| 1127560 | N/A | N/A | 9607 | 9626 | TCTCAAGGGTACGCTGTCTG | 58 | 601 |
| 1127592 | N/A | N/A | 9694 | 9713 | AACCATCTAAGTCCTGGCAG | 48 | 602 |
| 1127624 | N/A | N/A | 9817 | 9836 | ACTGCAGCAATCCCAACCGG | 14 | 603 |
| 1127656 | N/A | N/A | 9909 | 9928 | TGTTGGGAAAAGAATCGGCA | 25 | 604 |
| 1127688 | N/A | N/A | 10183 | 10202 | GGGTTTTCCTGGCATACTCG | 29 | 605 |
| 1127720 | N/A | N/A | 11995 | 12014 | GGATGGTCCAAGTTATGATT | 85 | 606 |
| 1127752 | N/A | N/A | 12121 | 12140 | AGCCTCCAGAGTATATAGTC | 42 | 607 |
| 1127784 | N/A | N/A | 12344 | 12363 | ATAGAGCTAACCAGTCAAAG | 69 | 608 |
| 1127816 | N/A | N/A | 12616 | 12635 | ACAAGTATAAGTCTCCTCAG | 72 | 609 |
| 1127848 | N/A | N/A | 13324 | 13343 | ACCTAGATGGTTAGGCTCCC | 27 | 610 |
| 1127880 | N/A | N/A | 13513 | 13532 | CAGAGGATGTCTTAGGTAAT | 60 | 611 |
| 1127912 | N/A | N/A | 13789 | 13808 | GTTCTCCCTAGTTATAAACT | 38 | 612 |
| 1127944 | N/A | N/A | 14364 | 14383 | TCTGCTCGCTGCCGTTCACC | 42 | 613 |
| 1127954 | N/A | N/A | 15654 | 15673 | CCGTCTACAGGATTTTCTAG | 95 | 83 |
| 1127977 | N/A | N/A | 15716 | 15735 | GCCTGTCCTGACAACCCCGT | 37 | 614 |
| 1128009 | N/A | N/A | 16759 | 16778 | GTAAAGCTAGCAGTGTCACA | 83 | 615 |
| 1128041 | N/A | N/A | 16928 | 16947 | GGTTTGCGATGAGGACCCAA | 75 | 616 |
| 1128073 | N/A | N/A | 17221 | 17240 | ACCTCTGGCTGGTAATTGGC | 42 | 617 |
| 1128105 | N/A | N/A | 18078 | 18097 | CACAGAGGTCCAATCCATAC | 19 | 618 |
| 1128137 | N/A | N/A | 18259 | 18278 | ACCCTAAGTGCCTCGCCTCC | 18 | 619 |
| 1128169 | N/A | N/A | 19348 | 19367 | TGGCCCGATAAAACTACCAC | 8 | 620 |
| 1128201 | N/A | N/A | 19557 | 19576 | CCCTAGACTCAATAGAATGA | 11 | 621 |
| 1128233 | N/A | N/A | 19738 | 19757 | ACAACTTAGCTGTCTGGGTT | 21 | 622 |
| 1128265 | N/A | N/A | 19844 | 19863 | TACAACTCCCAGCATCCCGA | 17 | 623 |
| 1128297 | N/A | N/A | 21099 | 21118 | GATTCCCACTAGTACAACCT | 26 | 624 |
| 1128329 | N/A | N/A | 21566 | 21585 | GGTAAAAAGCTTGTCTAGCA | 39 | 625 |
| 1128361 | N/A | N/A | 21811 | 21830 | TAGGATGCCATGACCACGCT | 37 | 626 |
| 1128393 | N/A | N/A | 21916 | 21935 | CACGCGCTGTAGCAGAACAG | 20 | 627 |
| 1128425 | N/A | N/A | 22083 | 22102 | AGACTTGGCCACACTCGGCT | 0 | 628 |
| 1128457 | N/A | N/A | 22882 | 22901 | TGGTTCCCCCGCCGCTGTTC | 13 | 629 |
| 1128489 | N/A | N/A | 24649 | 24668 | CGGGCCAAGGTCCATCATTC | 12 | 630 |
| 1128521 | N/A | N/A | 24746 | 24765 | CTCCAAGATGCGGGAAAGTC | 31 | 631 |
| 1128553 | N/A | N/A | 24926 | 24945 | TTCCCTCATCGCCTACCGTC | 0 | 632 |
| 1128585 | N/A | N/A | 25235 | 25254 | GGGAGATCTTCATGGTCTCC | 12 | 633 |
| 1128617 | N/A | N/A | 25565 | 25584 | TCGGCCTGGTTCATTGCTTA | 19 | 634 |
| 1128649 | N/A | N/A | 25946 | 25965 | CTGAGCCATACCCCTCAAAC | 30 | 635 |
| 1128681 | N/A | N/A | 26248 | 26267 | CCTTTAGCTCCTGGCTAAGC | 0 | 636 |

TABLE 10
Reduction of GYS1 RNA by 5-10-5 MOE gapmers in A431 cells

| | SEQ | SEQ | SEQ | SEQ | | | |
|---|---|---|---|---|---|---|---|
| | ID | ID | ID | ID | | | |
| | NO: 1 | NO: 1 | NO: 2 | NO: 2 | | | SEQ |
| Compound | Start | Stop | Start | Stop | | % | ID |
| Number | Site | Site | Site | Site | Sequence (5′ to 3′) | Reduction | No. |
| 1126249 | 4 | 23 | 2651 | 2670 | GTGAAACCTCGCAGCCGCCA | 0 | 637 |
| 1126281 | 130 | 149 | 2777 | 2796 | CTGGTGCCCGACGGGAAGCT | 6 | 638 |
| 1126313 | 196 | 215 | 2843 | 2862 | GGATCTCCAGGTAGGGACCC | 0 | 639 |
| 1126345 | 367 | 386 | 4525 | 4544 | TCTGCAGCACCGTGTAGATG | 0 | 640 |
| 1126377 | 644 | 663 | 8718 | 8737 | ACTCCGATGTTGCAGGTATC | 34 | 641 |
| 1126409 | 825 | 844 | 10057 | 10076 | GATGGTTGCTACAGGCAGTC | 0 | 642 |
| 1126441 | 972 | 991 | 10448 | 10467 | GTGGGCTGCCGCCCTTTCCA | 0 | 643 |
| 1126473 | 1156 | 1175 | 13255 | 13274 | AATGGCCCCGCACAAACTCC | 0 | 644 |
| 1126505 | 1286 | 1305 | 13729 | 13748 | ACTCTGAGCAGATAGTTGAG | 0 | 645 |
| 1126537 | 1436 | 1455 | 17869 | 17888 | TAAAGCTTCCTCCCGAACTT | 4 | 646 |
| 1126569 | 1613 | 1632 | 21331 | 21350 | CCGATTCGGCGGATGGTGGT | 0 | 647 |
| 1126601 | 1719 | 1738 | 21717 | 21736 | GCCACGGACAAACTCCTCAT | 13 | 648 |
| 1126633 | 1904 | 1923 | 25309 | 25328 | TCCAGGCTGCGGAACCGCCG | 0 | 649 |
| 1126665 | 1989 | 2008 | 25394 | 25413 | CGTGCGGTTCCGCTGGATGA | 0 | 650 |
| 1126697 | 2162 | 2181 | 26420 | 26439 | GAGGGCGACGGTGGCACCGA | 0 | 651 |
| 1126729 | 2298 | 2317 | 26556 | 26575 | CTCTGGTGCACGGATGTTGC | 16 | 652 |
| 1126761 | 2439 | 2458 | 26697 | 26716 | GACTTAGTTACGCTCCTCGC | 32 | 653 |
| 1126793 | 2733 | 2752 | 26991 | 27010 | CACCACCGCAGAGTAATGGC | 51 | 654 |
| 1126825 | 2897 | 2916 | 27155 | 27174 | ATCGCCCCATTCGCAGGGAC | 0 | 655 |
| 1126857 | 2966 | 2985 | 27224 | 27243 | GAGTTGAAATGGAGGACCAT | 15 | 656 |
| 1126889 | 3305 | 3324 | 27563 | 27582 | CTAGTGGTTTCACAGTGGGC | 76 | 657 |
| 1126921 | 3518 | 3537 | 27776 | 27795 | AACTGCAAACCAAGCGGTGC | 0 | 658 |
| 1126953 | N/A | N/A | 3062 | 3081 | CCTACAACTCAGAGTTCCGG | 42 | 659 |
| 1126985 | N/A | N/A | 3174 | 3193 | TCTTAAGTCAAACGAACCAT | 17 | 660 |
| 1127017 | N/A | N/A | 3332 | 3351 | CTTCCCAGGTTTGCACGCAG | 87 | 661 |
| 1127049 | N/A | N/A | 3378 | 3397 | TCCCCTAGACCATGCTGTTA | 4 | 662 |
| 1127081 | N/A | N/A | 3539 | 3558 | GAACTAATAGCTCAGGCCCT | 38 | 663 |
| 1127113 | N/A | N/A | 3742 | 3761 | GTGTGAGATTGGCTTGTTCC | 92 | 220 |
| 1127145 | N/A | N/A | 4089 | 4108 | TCGCAGCCAGGCTCCAAAAC | 42 | 664 |
| 1127177 | N/A | N/A | 4206 | 4225 | GCCGGGACCCCTTGGTCTGA | 9 | 665 |
| 1127209 | N/A | N/A | 4736 | 4755 | CCACCCCGATGGCAGGCTGT | 0 | 666 |
| 1127241 | N/A | N/A | 4924 | 4943 | TTGGATCTCCGTCTCAGTCT | 79 | 667 |
| 1127273 | N/A | N/A | 5409 | 5428 | TCACCGCCCACACAATGTGC | 3 | 668 |
| 1127305 | N/A | N/A | 5786 | 5805 | TTAGCCCTGCCGCCTGATGG | 43 | 669 |
| 1127337 | N/A | N/A | 5930 | 5949 | TCAGGAAGCGACTGGGCTGT | 29 | 670 |
| 1127369 | N/A | N/A | 6238 | 6257 | TAGCCCATCCTCTGTCCGTG | 83 | 671 |
| 1127401 | N/A | N/A | 7537 | 7556 | CACCTCACCTCCTACAGGCG | 0 | 672 |
| 1127433 | N/A | N/A | 8379 | 8398 | CTGTTGCAATATTTTCCGTG | 95 | 673 |
| 1127465 | N/A | N/A | 8833 | 8852 | CATTGTAGTTTCAGGTATGG | 61 | 674 |
| 1127497 | N/A | N/A | 8968 | 8987 | TTGGCATCGAGAGTAGAGCC | 21 | 675 |
| 1127529 | N/A | N/A | 9057 | 9076 | ACTCCTAGAATTCCTCGGGC | 32 | 676 |
| 1127561 | N/A | N/A | 9608 | 9627 | GTCTCAAGGGTACGCTGTCT | 64 | 677 |
| 1127593 | N/A | N/A | 9695 | 9714 | CAACCATCTAAGTCCTGGCA | 38 | 678 |
| 1127625 | N/A | N/A | 9818 | 9837 | CACTGCAGCAATCCCAACCG | 12 | 679 |
| 1127657 | N/A | N/A | 9910 | 9929 | GTGTTGGGAAAAGAATCGGC | 38 | 680 |
| 1127689 | N/A | N/A | 10202 | 10221 | TTGGGCCCCCCAGAGCTTTG | 0 | 681 |
| 1127721 | N/A | N/A | 11996 | 12015 | AGGATGGTCCAAGTTATGAT | 84 | 682 |
| 1127753 | N/A | N/A | 12194 | 12213 | ACCAATCTACATTAGCCAAT | 60 | 683 |
| 1127785 | N/A | N/A | 12345 | 12364 | TATAGAGCTAACCAGTCAAA | 29 | 684 |
| 1127817 | N/A | N/A | 12619 | 12638 | AGCACAAGTATAAGTCTCCT | 88 | 685 |
| 1127849 | N/A | N/A | 13325 | 13344 | GACCTAGATGGTTAGGCTCC | 17 | 686 |
| 1127881 | N/A | N/A | 13514 | 13533 | GCAGAGGATGTCTTAGGTAA | 66 | 687 |
| 1127913 | N/A | N/A | 14175 | 14194 | TCACGGCCCCCCACCATACT | 0 | 688 |
| 1127945 | N/A | N/A | 14463 | 14482 | GGGCTGCTAACCAAAGCTGT | 0 | 689 |
| 1127954 | N/A | N/A | 15654 | 15673 | CCGTCTACAGGATTTTCTAG | 94 | 83 |
| 1127978 | N/A | N/A | 15717 | 15736 | GGCCTGTCCTGACAACCCCG | 15 | 690 |
| 1128010 | N/A | N/A | 16762 | 16781 | CAAGTAAAGCTAGCAGTGTC | 58 | 691 |
| 1128042 | N/A | N/A | 16929 | 16948 | AGGTTTGCGATGAGGACCCA | 40 | 692 |
| 1128074 | N/A | N/A | 17223 | 17242 | TGACCTCTGGCTGGTAATTG | 25 | 693 |
| 1128106 | N/A | N/A | 18080 | 18099 | TGCACAGAGGTCCAATCCAT | 21 | 694 |
| 1128138 | N/A | N/A | 18260 | 18279 | CACCCTAAGTGCCTCGCCTC | 3 | 695 |
| 1128170 | N/A | N/A | 19350 | 19369 | AGTGGCCCGATAAAACTACC | 4 | 696 |
| 1128202 | N/A | N/A | 19558 | 19577 | CCCCTAGACTCAATAGAATG | 0 | 697 |
| 1128234 | N/A | N/A | 19739 | 19758 | TACAACTTAGCTGTCTGGGT | 31 | 698 |
| 1128266 | N/A | N/A | 19854 | 19873 | CCCGAGAAACTACAACTCCC | 8 | 699 |
| 1128298 | N/A | N/A | 21100 | 21119 | GGATTCCCACTAGTACAACC | 35 | 700 |
| 1128330 | N/A | N/A | 21567 | 21586 | GGGTAAAAAGCTTGTCTAGC | 30 | 701 |
| 1128362 | N/A | N/A | 21812 | 21831 | CTAGGATGCCATGACCACGC | 31 | 702 |
| 1128394 | N/A | N/A | 21917 | 21936 | GCACGCGCTGTAGCAGAACA | 16 | 703 |
| 1128426 | N/A | N/A | 22084 | 22103 | GAGACTTGGCCACACTCGGC | 10 | 704 |
| 1128458 | N/A | N/A | 22883 | 22902 | GTGGTTCCCCCGCCGCTGTT | 0 | 705 |
| 1128490 | N/A | N/A | 24650 | 24669 | TCGGGCCAAGGTCCATCATT | 5 | 706 |
| 1128522 | N/A | N/A | 24747 | 24766 | GCTCCAAGATGCGGGAAAGT | 20 | 707 |
| 1128554 | N/A | N/A | 24927 | 24946 | CTTCCCTCATCGCCTACCGT | 7 | 708 |
| 1128586 | N/A | N/A | 25279 | 25298 | TAGATACCTGTGGAGGCCAG | 5 | 709 |
| 1128618 | N/A | N/A | 25567 | 25586 | GATCGGCCTGGTTCATTGCT | 17 | 710 |
| 1128650 | N/A | N/A | 25950 | 25969 | GTTTCTGAGCCATACCCCTC | 30 | 711 |
| 1128682 | N/A | N/A | 26249 | 26268 | CCCTTTAGCTCCTGGCTAAG | 7 | 712 |

TABLE 11
Reduction of GYS1 RNA by 5-10-5 MOE gapmers in A431 cells

| | SEQ | SEQ | SEQ | SEQ | | | |
|---|---|---|---|---|---|---|---|
| | ID | ID | ID | ID | | | |
| | NO: 1 | NO: 1 | NO: 2 | NO: 2 | | | SEQ |
| Compound | Start | Stop | Start | Stop | | % | ID |
| Number | Site | Site | Site | Site | Sequence (5′ to 3′) | Reduction | No. |
| 1126250 | 5 | 24 | 2652 | 2671 | AGTGAAACCTCGCAGCCGCC | 0 | 713 |
| 1126282 | 132 | 151 | 2779 | 2798 | AGCTGGTGCCCGACGGGAAG | 52 | 714 |
| 1126314 | 232 | 251 | 2879 | 2898 | TTAAAGGCATGGCTGGCGCA | 31 | 715 |
| 1126346 | 368 | 387 | 4526 | 4545 | GTCTGCAGCACCGTGTAGAT | 25 | 716 |
| 1126378 | 646 | 665 | 8720 | 8739 | GCACTCCGATGTTGCAGGTA | 33 | 717 |
| 1126410 | 826 | 845 | 10058 | 10077 | AGATGGTTGCTACAGGCAGT | 13 | 718 |
| 1126442 | 974 | 993 | 10450 | 10469 | CAGTGGGCTGCCGCCCTTTC | 0 | 719 |
| 1126474 | 1157 | 1176 | 13256 | 13275 | AAATGGCCCCGCACAAACTC | 18 | 720 |
| 1126506 | 1287 | 1306 | 13730 | 13749 | CACTCTGAGCAGATAGTTGA | 0 | 721 |
| 1126538 | 1437 | 1456 | 17870 | 17889 | ATAAAGCTTCCTCCCGAACT | 20 | 722 |
| 1126570 | 1615 | 1634 | 21333 | 21352 | GGCCGATTCGGCGGATGGTG | 12 | 723 |
| 1126602 | 1721 | 1740 | 21719 | 21738 | CAGCCACGGACAAACTCCTC | 8 | 724 |
| 1126634 | 1907 | 1926 | 25312 | 25331 | TCATCCAGGCTGCGGAACCG | 14 | 725 |
| 1126666 | 1991 | 2010 | 25396 | 25415 | TCCGTGCGGTTCCGCTGGAT | 0 | 726 |
| 1126698 | 2163 | 2182 | 26421 | 26440 | CGAGGGCGACGGTGGCACCG | 0 | 727 |
| 1126730 | 2299 | 2318 | 26557 | 26576 | ACTCTGGTGCACGGATGTTG | 26 | 728 |
| 1126762 | 2441 | 2460 | 26699 | 26718 | CGGACTTAGTTACGCTCCTC | 17 | 729 |
| 1126794 | 2734 | 2753 | 26992 | 27011 | GCACCACCGCAGAGTAATGG | 69 | 730 |
| 1126826 | 2899 | 2918 | 27157 | 27176 | TGATCGCCCCATTCGCAGGG | 18 | 731 |
| 1126858 | 3001 | 3020 | 27259 | 27278 | AGGGCTAGAACATCCCTCCC | 0 | 732 |
| 1126890 | 3307 | 3326 | 27565 | 27584 | ACCTAGTGGTTTCACAGTGG | 55 | 733 |
| 1126922 | 3519 | 3538 | 27777 | 27796 | CAACTGCAAACCAAGCGGTG | 9 | 734 |
| 1126954 | N/A | N/A | 3063 | 3082 | TCCTACAACTCAGAGTTCCG | 48 | 735 |
| 1126986 | N/A | N/A | 3176 | 3195 | CATCTTAAGTCAAACGAACC | 14 | 736 |
| 1127018 | N/A | N/A | 3333 | 3352 | GCTTCCCAGGTTTGCACGCA | 79 | 737 |
| 1127050 | N/A | N/A | 3379 | 3398 | ATCCCCTAGACCATGCTGTT | 46 | 738 |
| 1127082 | N/A | N/A | 3540 | 3559 | GGAACTAATAGCTCAGGCCC | 2 | 739 |
| 1127114 | N/A | N/A | 3743 | 3762 | GGTGTGAGATTGGCTTGTTC | 91 | 740 |
| 1127146 | N/A | N/A | 4090 | 4109 | ATCGCAGCCAGGCTCCAAAA | 72 | 741 |
| 1127178 | N/A | N/A | 4207 | 4226 | TGCCGGGACCCCTTGGTCTG | 30 | 742 |
| 1127210 | N/A | N/A | 4742 | 4761 | TGGCTCCCACCCCGATGGCA | 45 | 743 |
| 1127242 | N/A | N/A | 4925 | 4944 | CTTGGATCTCCGTCTCAGTC | 65 | 744 |
| 1127274 | N/A | N/A | 5410 | 5429 | ATCACCGCCCACACAATGTG | 21 | 745 |
| 1127306 | N/A | N/A | 5787 | 5806 | CTTAGCCCTGCCGCCTGATG | 36 | 746 |
| 1127338 | N/A | N/A | 5966 | 5985 | ATTCTTAGGCCCCCAGCACG | 15 | 747 |
| 1127370 | N/A | N/A | 6244 | 6263 | CTAACATAGCCCATCCTCTG | 21 | 748 |
| 1127402 | N/A | N/A | 7654 | 7673 | CACGGGATGCTTCTTTTTTG | 89 | 749 |
| 1127434 | N/A | N/A | 8381 | 8400 | CTCTGTTGCAATATTTTCCG | 87 | 750 |
| 1127466 | N/A | N/A | 8836 | 8855 | GGTCATTGTAGTTTCAGGTA | 97 | 751 |
| 1127498 | N/A | N/A | 8969 | 8988 | GTTGGCATCGAGAGTAGAGC | 89 | 752 |
| 1127530 | N/A | N/A | 9058 | 9077 | AACTCCTAGAATTCCTCGGG | 50 | 753 |
| 1127562 | N/A | N/A | 9609 | 9628 | TGTCTCAAGGGTACGCTGTC | 41 | 754 |
| 1127594 | N/A | N/A | 9696 | 9715 | CCAACCATCTAAGTCCTGGC | 67 | 755 |
| 1127626 | N/A | N/A | 9823 | 9842 | CGGCCCACTGCAGCAATCCC | 13 | 756 |
| 1127658 | N/A | N/A | 9911 | 9930 | AGTGTTGGGAAAAGAATCGG | 14 | 757 |
| 1127690 | N/A | N/A | 10203 | 10222 | CTTGGGCCCCCCAGAGCTTT | 10 | 758 |
| 1127722 | N/A | N/A | 11997 | 12016 | TAGGATGGTCCAAGTTATGA | 50 | 759 |
| 1127754 | N/A | N/A | 12196 | 12215 | AGACCAATCTACATTAGCCA | 66 | 760 |
| 1127786 | N/A | N/A | 12346 | 12365 | ATATAGAGCTAACCAGTCAA | 44 | 761 |
| 1127818 | N/A | N/A | 12627 | 12646 | GGTTCACAAGCACAAGTATA | 72 | 762 |
| 1127850 | N/A | N/A | 13326 | 13345 | AGACCTAGATGGTTAGGCTC | 23 | 763 |
| 1127882 | N/A | N/A | 13515 | 13534 | GGCAGAGGATGTCTTAGGTA | 86 | 764 |
| 1127914 | N/A | N/A | 14184 | 14203 | ATACTCCCCTCACGGCCCCC | 6 | 765 |
| 1127946 | N/A | N/A | 14465 | 14484 | GAGGGCTGCTAACCAAAGCT | 24 | 766 |
| 1127954 | N/A | N/A | 15654 | 15673 | CCGTCTACAGGATTTTCTAG | 93 | 83 |
| 1127979 | N/A | N/A | 15801 | 15820 | CGAGTTTGCTGTTCCTCAGA | 94 | 314 |
| 1128011 | N/A | N/A | 16763 | 16782 | ACAAGTAAAGCTAGCAGTGT | 61 | 767 |
| 1128043 | N/A | N/A | 16937 | 16956 | AACCTCAGAGGTTTGCGATG | 40 | 768 |
| 1128075 | N/A | N/A | 17774 | 17793 | GTTAGGCTTCTTTAGTTAGT | 70 | 769 |
| 1128107 | N/A | N/A | 18082 | 18101 | TCTGCACAGAGGTCCAATCC | 0 | 770 |
| 1128139 | N/A | N/A | 18261 | 18280 | CCACCCTAAGTGCCTCGCCT | 3 | 771 |
| 1128171 | N/A | N/A | 19351 | 19370 | AAGTGGCCCGATAAAACTAC | 4 | 772 |
| 1128203 | N/A | N/A | 19559 | 19578 | GCCCCTAGACTCAATAGAAT | 0 | 773 |
| 1128235 | N/A | N/A | 19744 | 19763 | GTTTCTACAACTTAGCTGTC | 49 | 774 |
| 1128267 | N/A | N/A | 19855 | 19874 | GCCCGAGAAACTACAACTCC | 20 | 775 |
| 1128299 | N/A | N/A | 21101 | 21120 | TGGATTCCCACTAGTACAAC | 40 | 776 |
| 1128331 | N/A | N/A | 21591 | 21610 | TGAGATCCCAAGGTGGCCCA | 0 | 777 |
| 1128363 | N/A | N/A | 21813 | 21832 | ACTAGGATGCCATGACCACG | 17 | 778 |
| 1128395 | N/A | N/A | 21919 | 21938 | AAGCACGCGCTGTAGCAGAA | 28 | 779 |
| 1128427 | N/A | N/A | 22085 | 22104 | GGAGACTTGGCCACACTCGG | 0 | 780 |
| 1128459 | N/A | N/A | 22885 | 22904 | GGGTGGTTCCCCCGCCGCTG | 9 | 781 |
| 1128491 | N/A | N/A | 24651 | 24670 | ATCGGGCCAAGGTCCATCAT | 0 | 782 |
| 1128523 | N/A | N/A | 24748 | 24767 | TGCTCCAAGATGCGGGAAAG | 16 | 783 |
| 1128555 | N/A | N/A | 24929 | 24948 | AGCTTCCCTCATCGCCTACC | 6 | 784 |
| 1128587 | N/A | N/A | 25280 | 25299 | GTAGATACCTGTGGAGGCCA | 16 | 785 |
| 1128619 | N/A | N/A | 25568 | 25587 | CGATCGGCCTGGTTCATTGC | 10 | 786 |
| 1128651 | N/A | N/A | 25951 | 25970 | AGTTTCTGAGCCATACCCCT | 26 | 787 |
| 1128683 | N/A | N/A | 26250 | 26269 | GCCCTTTAGCTCCTGGCTAA | 0 | 788 |

TABLE 12
Reduction of GYS1 RNA by 5-10-5 MOE gapmers in A431 cells

| | SEQ | SEQ | SEQ | SEQ | | | |
|---|---|---|---|---|---|---|---|
| | ID | ID | ID | ID | | | |
| | NO: 1 | NO: 1 | NO: 2 | NO: 2 | | | SEQ |
| Compound | Start | Stop | Start | Stop | | % | ID |
| Number | Site | Site | Site | Site | Sequence (5′ to 3′) | Reduction | No. |
| 1126251 | 7 | 26 | 2654 | 2673 | GCAGTGAAACCTCGCAGCCG | 0 | 789 |
| 1126283 | 133 | 152 | 2780 | 2799 | TAGCTGGTGCCCGACGGGAA | 48 | 790 |
| 1126315 | 233 | 252 | 2880 | 2899 | TTTAAAGGCATGGCTGGCGC | 33 | 791 |
| 1126347 | 391 | 410 | 4549 | 4568 | CGTCCCCTGTCACCTTCGCC | 62 | 792 |
| 1126379 | 647 | 666 | 8721 | 8740 | GGCACTCCGATGTTGCAGGT | 34 | 793 |
| 1126411 | 829 | 848 | 10061 | 10080 | TGAAGATGGTTGCTACAGGC | 42 | 794 |
| 1126443 | 975 | 994 | 10451 | 10470 | GCAGTGGGCTGCCGCCCTTT | 0 | 795 |
| 1126475 | 1158 | 1177 | 13257 | 13276 | AAAATGGCCCCGCACAAACT | 0 | 796 |
| 1126507 | 1288 | 1307 | 13731 | 13750 | TCACTCTGAGCAGATAGTTG | 31 | 797 |
| 1126539 | 1438 | 1457 | 17871 | 17890 | CATAAAGCTTCCTCCCGAAC | 6 | 798 |
| 1126571 | 1616 | 1635 | 21334 | 21353 | AGGCCGATTCGGCGGATGGT | 8 | 799 |
| 1126603 | 1722 | 1741 | 21720 | 21739 | ACAGCCACGGACAAACTCCT | 0 | 800 |
| 1126635 | 1908 | 1927 | 25313 | 25332 | ATCATCCAGGCTGCGGAACC | 0 | 801 |
| 1126667 | 1992 | 2011 | 25397 | 25416 | CTCCGTGCGGTTCCGCTGGA | 5 | 802 |
| 1126699 | 2165 | 2184 | 26423 | 26442 | AGCGAGGGCGACGGTGGCAC | 25 | 803 |
| 1126731 | 2300 | 2319 | 26558 | 26577 | CACTCTGGTGCACGGATGTT | 33 | 804 |
| 1126763 | 2442 | 2461 | 26700 | 26719 | GCGGACTTAGTTACGCTCCT | 1 | 805 |
| 1126795 | 2735 | 2754 | 26993 | 27012 | GGCACCACCGCAGAGTAATG | 77 | 806 |
| 1126827 | 2900 | 2919 | 27158 | 27177 | TTGATCGCCCCATTCGCAGG | 25 | 807 |
| 1126859 | 3003 | 3022 | 27261 | 27280 | GGAGGGCTAGAACATCCCTC | 5 | 808 |
| 1126891 | 3308 | 3327 | 27566 | 27585 | AACCTAGTGGTTTCACAGTG | 47 | 809 |
| 1126923 | 3520 | 3539 | 27778 | 27797 | TCAACTGCAAACCAAGCGGT | 14 | 810 |
| 1126955 | N/A | N/A | 3068 | 3087 | CGTCCTCCTACAACTCAGAG | 61 | 811 |
| 1126987 | N/A | N/A | 3177 | 3196 | TCATCTTAAGTCAAACGAAC | 31 | 812 |
| 1127019 | N/A | N/A | 3334 | 3353 | AGCTTCCCAGGTTTGCACGC | 84 | 813 |
| 1127051 | N/A | N/A | 3380 | 3399 | TATCCCCTAGACCATGCTGT | 30 | 814 |
| 1127083 | N/A | N/A | 3541 | 3560 | AGGAACTAATAGCTCAGGCC | 64 | 815 |
| 1127115 | N/A | N/A | 3749 | 3768 | CTTTGAGGTGTGAGATTGGC | 72 | 816 |
| 1127147 | N/A | N/A | 4092 | 4111 | AAATCGCAGCCAGGCTCCAA | 19 | 817 |
| 1127179 | N/A | N/A | 4208 | 4227 | GTGCCGGGACCCCTTGGTCT | 2 | 818 |
| 1127211 | N/A | N/A | 4758 | 4777 | GCACCCTCTCCGTCTGTGGC | 57 | 819 |
| 1127243 | N/A | N/A | 4927 | 4946 | CTCTTGGATCTCCGTCTCAG | 71 | 820 |
| 1127275 | N/A | N/A | 5411 | 5430 | AATCACCGCCCACACAATGT | 13 | 821 |
| 1127307 | N/A | N/A | 5788 | 5807 | CCTTAGCCCTGCCGCCTGAT | 44 | 822 |
| 1127339 | N/A | N/A | 5967 | 5986 | TATTCTTAGGCCCCCAGCAC | 14 | 823 |
| 1127371 | N/A | N/A | 6258 | 6277 | CACGCCACACATTTCTAACA | 17 | 824 |
| 1127403 | N/A | N/A | 7656 | 7675 | TCCACGGGATGCTTCTTTTT | 83 | 825 |
| 1127435 | N/A | N/A | 8440 | 8459 | GCTGCCTTAGCCTTACTTCT | 43 | 826 |
| 1127467 | N/A | N/A | 8838 | 8857 | ATGGTCATTGTAGTTTCAGG | 89 | 827 |
| 1127499 | N/A | N/A | 8970 | 8989 | AGTTGGCATCGAGAGTAGAG | 89 | 828 |
| 1127531 | N/A | N/A | 9059 | 9078 | CAACTCCTAGAATTCCTCGG | 39 | 829 |
| 1127563 | N/A | N/A | 9610 | 9629 | TTGTCTCAAGGGTACGCTGT | 40 | 830 |
| 1127595 | N/A | N/A | 9697 | 9716 | GCCAACCATCTAAGTCCTGG | 70 | 831 |
| 1127627 | N/A | N/A | 9824 | 9843 | GCGGCCCACTGCAGCAATCC | 1 | 832 |
| 1127659 | N/A | N/A | 9912 | 9931 | GAGTGTTGGGAAAAGAATCG | 12 | 833 |
| 1127691 | N/A | N/A | 10307 | 10326 | GTCCCAAGAGAAATTGGTGC | 17 | 834 |
| 1127723 | N/A | N/A | 11998 | 12017 | TTAGGATGGTCCAAGTTATG | 47 | 835 |
| 1127755 | N/A | N/A | 12197 | 12216 | AAGACCAATCTACATTAGCC | 52 | 836 |
| 1127787 | N/A | N/A | 12347 | 12366 | CATATAGAGCTAACCAGTCA | 34 | 837 |
| 1127819 | N/A | N/A | 12629 | 12648 | TAGGTTCACAAGCACAAGTA | 69 | 838 |
| 1127851 | N/A | N/A | 13327 | 13346 | CAGACCTAGATGGTTAGGCT | 37 | 839 |
| 1127883 | N/A | N/A | 13566 | 13585 | CCCGCTAGCCCTGGCCTCAA | 3 | 840 |
| 1127915 | N/A | N/A | 14185 | 14204 | TATACTCCCCTCACGGCCCC | 0 | 841 |
| 1127947 | N/A | N/A | 14466 | 14485 | CGAGGGCTGCTAACCAAAGC | 33 | 842 |
| 1127954 | N/A | N/A | 15654 | 15673 | CCGTCTACAGGATTTTCTAG | 94 | 83 |
| 1127980 | N/A | N/A | 15802 | 15821 | TCGAGTTTGCTGTTCCTCAG | 88 | 843 |
| 1128012 | N/A | N/A | 16764 | 16783 | CACAAGTAAAGCTAGCAGTG | 46 | 844 |
| 1128044 | N/A | N/A | 16938 | 16957 | CAACCTCAGAGGTTTGCGAT | 25 | 845 |
| 1128076 | N/A | N/A | 17775 | 17794 | TGTTAGGCTTCTTTAGTTAG | 49 | 846 |
| 1128108 | N/A | N/A | 18186 | 18205 | ATCCCTTCATAAAGGGCTGC | 0 | 847 |
| 1128140 | N/A | N/A | 18263 | 18282 | GCCCACCCTAAGTGCCTCGC | 0 | 848 |
| 1128172 | N/A | N/A | 19352 | 19371 | AAAGTGGCCCGATAAAACTA | 16 | 849 |
| 1128204 | N/A | N/A | 19560 | 19579 | GGCCCCTAGACTCAATAGAA | 0 | 850 |
| 1128236 | N/A | N/A | 19768 | 19787 | TTAGCCAAAAGCAGTTCACG | 31 | 851 |
| 1128268 | N/A | N/A | 19856 | 19875 | GGCCCGAGAAACTACAACTC | 0 | 852 |
| 1128300 | N/A | N/A | 21102 | 21121 | GTGGATTCCCACTAGTACAA | 6 | 853 |
| 1128332 | N/A | N/A | 21604 | 21623 | TTTAGCTAAGCCCTGAGATC | 0 | 854 |
| 1128364 | N/A | N/A | 21816 | 21835 | CTGACTAGGATGCCATGACC | 18 | 855 |
| 1128396 | N/A | N/A | 21920 | 21939 | AAAGCACGCGCTGTAGCAGA | 28 | 856 |
| 1128428 | N/A | N/A | 22086 | 22105 | AGGAGACTTGGCCACACTCG | 4 | 857 |
| 1128460 | N/A | N/A | 23979 | 23998 | GAGCACACAACACTACGCAT | 12 | 858 |
| 1128492 | N/A | N/A | 24652 | 24671 | GATCGGGCCAAGGTCCATCA | 8 | 859 |
| 1128524 | N/A | N/A | 24749 | 24768 | TTGCTCCAAGATGCGGGAAA | 28 | 860 |
| 1128556 | N/A | N/A | 24930 | 24949 | TAGCTTCCCTCATCGCCTAC | 0 | 861 |
| 1128588 | N/A | N/A | 25290 | 25309 | GGTCAAGAATGTAGATACCT | 33 | 862 |
| 1128620 | N/A | N/A | 25569 | 25588 | GCGATCGGCCTGGTTCATTG | 40 | 863 |
| 1128652 | N/A | N/A | 25952 | 25971 | CAGTTTCTGAGCCATACCCC | 25 | 864 |
| 1128684 | N/A | N/A | 26251 | 26270 | AGCCCTTTAGCTCCTGGCTA | 0 | 865 |

TABLE 13
Reduction of GYS1 RNA by 5-10-5 MOE gapmers in A431 cells

| | SEQ | SEQ | SEQ | SEQ | | | |
|---|---|---|---|---|---|---|---|
| | ID | ID | ID | ID | | | |
| | NO: 1 | NO: 1 | NO: 2 | NO: 2 | | | SEQ |
| Compound | Start | Stop | Start | Stop | | % | ID |
| Number | Site | Site | Site | Site | Sequence (5′ to 3′) | Reduction | No. |
| 1126252 | 8 | 27 | 2655 | 2674 | TGCAGTGAAACCTCGCAGCC | 0 | 866 |
| 1126284 | 134 | 153 | 2781 | 2800 | GTAGCTGGTGCCCGACGGGA | 55 | 867 |
| 1126316 | 234 | 253 | 2881 | 2900 | GTTTAAAGGCATGGCTGGCG | 44 | 868 |
| 1126348 | 411 | 430 | 4569 | 4588 | GAAGTAGTTGTCGCCCCATT | 62 | 869 |
| 1126380 | 648 | 667 | 8722 | 8741 | CGGCACTCCGATGTTGCAGG | 39 | 870 |
| 1126412 | 830 | 849 | 10062 | 10081 | GTGAAGATGGTTGCTACAGG | 53 | 871 |
| 1126444 | 976 | 995 | 10452 | 10471 | CGCAGTGGGCTGCCGCCCTT | 12 | 872 |
| 1126476 | 1160 | 1179 | 13259 | 13278 | TAAAAATGGCCCCGCACAAA | 10 | 873 |
| 1126508 | 1305 | 1324 | 14366 | 14385 | TGTCTGCTCGCTGCCGTTCA | 40 | 874 |
| 1126540 | 1439 | 1458 | 17872 | 17891 | TCATAAAGCTTCCTCCCGAA | 30 | 875 |
| 1126572 | 1617 | 1636 | 21335 | 21354 | GAGGCCGATTCGGCGGATGG | 21 | 876 |
| 1126604 | 1724 | 1743 | 21722 | 21741 | TGACAGCCACGGACAAACTC | 18 | 877 |
| 1126636 | 1909 | 1928 | 25314 | 25333 | AATCATCCAGGCTGCGGAAC | 0 | 878 |
| 1126668 | 1993 | 2012 | 25398 | 25417 | GCTCCGTGCGGTTCCGCTGG | 0 | 879 |
| 1126700 | 2166 | 2185 | 26424 | 26443 | CAGCGAGGGCGACGGTGGCA | 13 | 880 |
| 1126732 | 2302 | 2321 | 26560 | 26579 | GCCACTCTGGTGCACGGATG | 56 | 881 |
| 1126764 | 2511 | 2530 | 26769 | 26788 | TTAGGAGCAGCACCCCTCTG | 8 | 882 |
| 1126796 | 2736 | 2755 | 26994 | 27013 | TGGCACCACCGCAGAGTAAT | 67 | 883 |
| 1126828 | 2901 | 2920 | 27159 | 27178 | CTTGATCGCCCCATTCGCAG | 54 | 884 |
| 1126860 | 3048 | 3067 | 27306 | 27325 | CGGATGGAGGGATCCTCCAG | 6 | 885 |
| 1126892 | 3309 | 3328 | 27567 | 27586 | GAACCTAGTGGTTTCACAGT | 6 | 886 |
| 1126924 | 3558 | 3577 | 27816 | 27835 | CGGACACACTCCAATCACAC | 54 | 887 |
| 1126956 | N/A | N/A | 3069 | 3088 | CCGTCCTCCTACAACTCAGA | 61 | 888 |
| 1126988 | N/A | N/A | 3180 | 3199 | CTTTCATCTTAAGTCAAACG | 48 | 889 |
| 1127020 | N/A | N/A | 3335 | 3354 | CAGCTTCCCAGGTTTGCACG | 75 | 890 |
| 1127052 | N/A | N/A | 3381 | 3400 | TTATCCCCTAGACCATGCTG | 37 | 891 |
| 1127084 | N/A | N/A | 3542 | 3561 | TAGGAACTAATAGCTCAGGC | 90 | 892 |
| 1127116 | N/A | N/A | 3774 | 3793 | GCAAAGCAACCCCCCAGACC | 10 | 893 |
| 1127148 | N/A | N/A | 4094 | 4113 | TTAAATCGCAGCCAGGCTCC | 13 | 894 |
| 1127180 | N/A | N/A | 4308 | 4327 | GCAGTCCTCCTGGGTCTAAG | 60 | 895 |
| 1127212 | N/A | N/A | 4799 | 4818 | GTCCAAGCCTGCCTCGCTCT | 66 | 896 |
| 1127244 | N/A | N/A | 4930 | 4949 | GGCCTCTTGGATCTCCGTCT | 45 | 897 |
| 1127276 | N/A | N/A | 5412 | 5431 | CAATCACCGCCCACACAATG | 13 | 898 |
| 1127308 | N/A | N/A | 5791 | 5810 | GTCCCTTAGCCCTGCCGCCT | 48 | 899 |
| 1127340 | N/A | N/A | 5968 | 5987 | CTATTCTTAGGCCCCCAGCA | 25 | 900 |
| 1127372 | N/A | N/A | 6259 | 6278 | CCACGCCACACATTTCTAAC | 20 | 901 |
| 1127404 | N/A | N/A | 7658 | 7677 | CTTCCACGGGATGCTTCTTT | 63 | 902 |
| 1127436 | N/A | N/A | 8501 | 8520 | ATAGACTTAAGCCTCAGCTC | 56 | 903 |
| 1127468 | N/A | N/A | 8843 | 8862 | GGCTGATGGTCATTGTAGTT | 41 | 904 |
| 1127500 | N/A | N/A | 8971 | 8990 | AAGTTGGCATCGAGAGTAGA | 46 | 905 |
| 1127532 | N/A | N/A | 9060 | 9079 | ACAACTCCTAGAATTCCTCG | 33 | 906 |
| 1127564 | N/A | N/A | 9611 | 9630 | CTTGTCTCAAGGGTACGCTG | 53 | 907 |
| 1127596 | N/A | N/A | 9698 | 9717 | GGCCAACCATCTAAGTCCTG | 27 | 908 |
| 1127628 | N/A | N/A | 9825 | 9844 | AGCGGCCCACTGCAGCAATC | 3 | 909 |
| 1127660 | N/A | N/A | 9913 | 9932 | CGAGTGTTGGGAAAAGAATC | 21 | 910 |
| 1127692 | N/A | N/A | 10357 | 10376 | AGTCCGGTTAGAAGGATTGG | 0 | 911 |
| 1127724 | N/A | N/A | 12001 | 12020 | GACTTAGGATGGTCCAAGTT | 26 | 912 |
| 1127756 | N/A | N/A | 12198 | 12217 | TAAGACCAATCTACATTAGC | 0 | 913 |
| 1127788 | N/A | N/A | 12350 | 12369 | GAACATATAGAGCTAACCAG | 65 | 914 |
| 1127820 | N/A | N/A | 12630 | 12649 | TTAGGTTCACAAGCACAAGT | 74 | 915 |
| 1127852 | N/A | N/A | 13328 | 13347 | CCAGACCTAGATGGTTAGGC | 29 | 916 |
| 1127884 | N/A | N/A | 13574 | 13593 | AGCCCTCACCCGCTAGCCCT | 0 | 917 |
| 1127916 | N/A | N/A | 14186 | 14205 | CTATACTCCCCTCACGGCCC | 0 | 918 |
| 1127948 | N/A | N/A | 14468 | 14487 | AGCGAGGGCTGCTAACCAAA | 39 | 919 |
| 1127954 | N/A | N/A | 15654 | 15673 | CCGTCTACAGGATTTTCTAG | 96 | 83 |
| 1127981 | N/A | N/A | 15803 | 15822 | TTCGAGTTTGCTGTTCCTCA | 96 | 920 |
| 1128013 | N/A | N/A | 16767 | 16786 | GCACACAAGTAAAGCTAGCA | 62 | 921 |
| 1128045 | N/A | N/A | 16939 | 16958 | TCAACCTCAGAGGTTTGCGA | 50 | 922 |
| 1128077 | N/A | N/A | 17787 | 17806 | GCTGCCATTTACTGTTAGGC | 15 | 923 |
| 1128109 | N/A | N/A | 18187 | 18206 | GATCCCTTCATAAAGGGCTG | 0 | 924 |
| 1128141 | N/A | N/A | 18264 | 18283 | AGCCCACCCTAAGTGCCTCG | 1 | 925 |
| 1128173 | N/A | N/A | 19353 | 19372 | TAAAGTGGCCCGATAAAACT | 0 | 926 |
| 1128205 | N/A | N/A | 19561 | 19580 | GGGCCCCTAGACTCAATAGA | 0 | 927 |
| 1128237 | N/A | N/A | 19770 | 19789 | GGTTAGCCAAAAGCAGTTCA | 33 | 928 |
| 1128269 | N/A | N/A | 19857 | 19876 | GGGCCCGAGAAACTACAACT | 5 | 929 |
| 1128301 | N/A | N/A | 21103 | 21122 | TGTGGATTCCCACTAGTACA | 13 | 930 |
| 1128333 | N/A | N/A | 21605 | 21624 | ATTTAGCTAAGCCCTGAGAT | 3 | 931 |
| 1128365 | N/A | N/A | 21818 | 21837 | CTCTGACTAGGATGCCATGA | 28 | 932 |
| 1128397 | N/A | N/A | 21922 | 21941 | CAAAAGCACGCGCTGTAGCA | 24 | 933 |
| 1128429 | N/A | N/A | 22088 | 22107 | CGAGGAGACTTGGCCACACT | 34 | 934 |
| 1128461 | N/A | N/A | 24521 | 24540 | TGTACAGAGCATCTAGTACG | 0 | 935 |
| 1128493 | N/A | N/A | 24654 | 24673 | AGGATCGGGCCAAGGTCCAT | 8 | 936 |
| 1128525 | N/A | N/A | 24750 | 24769 | CTTGCTCCAAGATGCGGGAA | 21 | 937 |
| 1128557 | N/A | N/A | 24931 | 24950 | TTAGCTTCCCTCATCGCCTA | 0 | 938 |
| 1128589 | N/A | N/A | 25439 | 25458 | TACCCGGCCTAGGTATTTCC | 8 | 939 |
| 1128621 | N/A | N/A | 25570 | 25589 | CGCGATCGGCCTGGTTCATT | 36 | 940 |
| 1128653 | N/A | N/A | 25953 | 25972 | ACAGTTTCTGAGCCATACCC | 25 | 941 |
| 1128685 | N/A | N/A | 26341 | 26360 | GGTGAGCTGAGGACCTCACA | 0 | 942 |

TABLE 14
Reduction of GYS1 RNA by 5-10-5 MOE gapmers in A431 cells

| | SEQ | SEQ | SEQ | SEQ | | | |
|---|---|---|---|---|---|---|---|
| | ID | ID | ID | ID | | | |
| | NO: 1 | NO: 1 | NO: 2 | NO: 2 | | | SEQ |
| Compound | Start | Stop | Start | Stop | | % | ID |
| Number | Site | Site | Site | Site | Sequence (5′ to 3′) | Reduction | No. |
| 1126253 | 9 | 28 | 2656 | 2675 | CTGCAGTGAAACCTCGCAGC | 0 | 943 |
| 1126285 | 135 | 154 | 2782 | 2801 | AGTAGCTGGTGCCCGACGGG | 30 | 944 |
| 1126317 | 235 | 254 | 2882 | 2901 | GGTTTAAAGGCATGGCTGGC | 64 | 945 |
| 1126349 | 412 | 431 | 4570 | 4589 | GGAAGTAGTTGTCGCCCCAT | 46 | 946 |
| 1126381 | 649 | 668 | 8723 | 8742 | ACGGCACTCCGATGTTGCAG | 0 | 947 |
| 1126413 | 831 | 850 | 10063 | 10082 | GGTGAAGATGGTTGCTACAG | 75 | 948 |
| 1126445 | 978 | 997 | 10454 | 10473 | AGCGCAGTGGGCTGCCGCCC | 0 | 949 |
| 1126477 | 1161 | 1180 | 13260 | 13279 | ATAAAAATGGCCCCGCACAA | 0 | 950 |
| 1126509 | 1306 | 1325 | 14367 | 14386 | CTGTCTGCTCGCTGCCGTTC | 43 | 951 |
| 1126541 | 1440 | 1459 | 17873 | 17892 | TTCATAAAGCTTCCTCCCGA | 24 | 952 |
| 1126573 | 1618 | 1637 | 21336 | 21355 | AGAGGCCGATTCGGCGGATG | 9 | 953 |
| 1126605 | 1725 | 1744 | 21723 | 21742 | GTGACAGCCACGGACAAACT | 7 | 954 |
| 1126637 | 1910 | 1929 | 25315 | 25334 | GAATCATCCAGGCTGCGGAA | 18 | 955 |
| 1126669 | 1994 | 2013 | 25399 | 25418 | CGCTCCGTGCGGTTCCGCTG | 0 | 956 |
| 1126701 | 2167 | 2186 | 26425 | 26444 | ACAGCGAGGGCGACGGTGGC | 0 | 957 |
| 1126733 | 2303 | 2322 | 26561 | 26580 | GGCCACTCTGGTGCACGGAT | 41 | 958 |
| 1126765 | 2512 | 2531 | 26770 | 26789 | TTTAGGAGCAGCACCCCTCT | 0 | 959 |
| 1126797 | 2737 | 2756 | 26995 | 27014 | CTGGCACCACCGCAGAGTAA | 64 | 960 |
| 1126829 | 2902 | 2921 | 27160 | 27179 | ACTTGATCGCCCCATTCGCA | 55 | 961 |
| 1126861 | 3049 | 3068 | 27307 | 27326 | CCGGATGGAGGGATCCTCCA | 0 | 962 |
| 1126893 | 3314 | 3333 | 27572 | 27591 | ACCTAGAACCTAGTGGTTTC | 20 | 963 |
| 1126925 | 3559 | 3578 | 27817 | 27836 | CCGGACACACTCCAATCACA | 64 | 964 |
| 1126957 | N/A | N/A | 3073 | 3092 | AGCCCCGTCCTCCTACAACT | 20 | 965 |
| 1126989 | N/A | N/A | 3209 | 3228 | TAGGACCCAGAACCCGGGCT | 11 | 966 |
| 1127021 | N/A | N/A | 3339 | 3358 | CCGGCAGCTTCCCAGGTTTG | 52 | 967 |
| 1127053 | N/A | N/A | 3385 | 3404 | AGTTTTATCCCCTAGACCAT | 33 | 968 |
| 1127085 | N/A | N/A | 3543 | 3562 | CTAGGAACTAATAGCTCAGG | 78 | 969 |
| 1127117 | N/A | N/A | 3832 | 3851 | GTGTTCACGGGCCCCCTCTC | 24 | 970 |
| 1127149 | N/A | N/A | 4095 | 4114 | TTTAAATCGCAGCCAGGCTC | 19 | 971 |
| 1127181 | N/A | N/A | 4309 | 4328 | GGCAGTCCTCCTGGGTCTAA | 64 | 972 |
| 1127213 | N/A | N/A | 4802 | 4821 | TGTGTCCAAGCCTGCCTCGC | 13 | 973 |
| 1127245 | N/A | N/A | 4931 | 4950 | TGGCCTCTTGGATCTCCGTC | 38 | 974 |
| 1127277 | N/A | N/A | 5413 | 5432 | ACAATCACCGCCCACACAAT | 0 | 975 |
| 1127309 | N/A | N/A | 5884 | 5903 | GACCTGAATGGATTCCAGAC | 37 | 976 |
| 1127341 | N/A | N/A | 5969 | 5988 | GCTATTCTTAGGCCCCCAGC | 49 | 977 |
| 1127373 | N/A | N/A | 6260 | 6279 | GCCACGCCACACATTTCTAA | 56 | 978 |
| 1127405 | N/A | N/A | 7662 | 7681 | ATTCCTTCCACGGGATGCTT | 56 | 979 |
| 1127437 | N/A | N/A | 8502 | 8521 | TATAGACTTAAGCCTCAGCT | 52 | 980 |
| 1127469 | N/A | N/A | 8844 | 8863 | GGGCTGATGGTCATTGTAGT | 36 | 981 |
| 1127501 | N/A | N/A | 8972 | 8991 | GAAGTTGGCATCGAGAGTAG | 43 | 982 |
| 1127533 | N/A | N/A | 9078 | 9097 | ATATCACACTAGAGAACTAC | 0 | 983 |
| 1127565 | N/A | N/A | 9612 | 9631 | CCTTGTCTCAAGGGTACGCT | 39 | 984 |
| 1127597 | N/A | N/A | 9699 | 9718 | TGGCCAACCATCTAAGTCCT | 7 | 985 |
| 1127629 | N/A | N/A | 9826 | 9845 | CAGCGGCCCACTGCAGCAAT | 0 | 986 |
| 1127661 | N/A | N/A | 9916 | 9935 | CCACGAGTGTTGGGAAAAGA | 0 | 987 |
| 1127693 | N/A | N/A | 10358 | 10377 | CAGTCCGGTTAGAAGGATTG | 15 | 988 |
| 1127725 | N/A | N/A | 12002 | 12021 | GGACTTAGGATGGTCCAAGT | 8 | 989 |
| 1127757 | N/A | N/A | 12259 | 12278 | TGCCCAGTTCTGACCTAACC | 9 | 990 |
| 1127789 | N/A | N/A | 12351 | 12370 | GGAACATATAGAGCTAACCA | 90 | 991 |
| 1127821 | N/A | N/A | 12631 | 12650 | CTTAGGTTCACAAGCACAAG | 73 | 992 |
| 1127853 | N/A | N/A | 13329 | 13348 | CCCAGACCTAGATGGTTAGG | 0 | 993 |
| 1127885 | N/A | N/A | 13576 | 13595 | AAAGCCCTCACCCGCTAGCC | 3 | 994 |
| 1127917 | N/A | N/A | 14187 | 14206 | TCTATACTCCCCTCACGGCC | 9 | 995 |
| 1127949 | N/A | N/A | 14469 | 14488 | GAGCGAGGGCTGCTAACCAA | 25 | 996 |
| 1127954 | N/A | N/A | 15654 | 15673 | CCGTCTACAGGATTTTCTAG | 95 | 83 |
| 1127982 | N/A | N/A | 15804 | 15823 | CTTCGAGTTTGCTGTTCCTC | 94 | 997 |
| 1128014 | N/A | N/A | 16768 | 16787 | GGCACACAAGTAAAGCTAGC | 25 | 998 |
| 1128046 | N/A | N/A | 16940 | 16959 | ATCAACCTCAGAGGTTTGCG | 68 | 999 |
| 1128078 | N/A | N/A | 17836 | 17855 | TTGGCCGTGTCCCTGGAGGA | 18 | 1000 |
| 1128110 | N/A | N/A | 18188 | 18207 | AGATCCCTTCATAAAGGGCT | 0 | 1001 |
| 1128142 | N/A | N/A | 18267 | 18286 | AACAGCCCACCCTAAGTGCC | 0 | 1002 |
| 1128174 | N/A | N/A | 19354 | 19373 | CTAAAGTGGCCCGATAAAAC | 1 | 1003 |
| 1128206 | N/A | N/A | 19562 | 19581 | TGGGCCCCTAGACTCAATAG | 0 | 1004 |
| 1128238 | N/A | N/A | 19773 | 19792 | ATAGGTTAGCCAAAAGCAGT | 28 | 1005 |
| 1128270 | N/A | N/A | 19875 | 19894 | CCACTCTACTGAGTCTAGGG | 38 | 1006 |
| 1128302 | N/A | N/A | 21104 | 21123 | TTGTGGATTCCCACTAGTAC | 0 | 1007 |
| 1128334 | N/A | N/A | 21609 | 21628 | CCTTATTTAGCTAAGCCCTG | 0 | 1008 |
| 1128366 | N/A | N/A | 21819 | 21838 | GCTCTGACTAGGATGCCATG | 9 | 1009 |
| 1128398 | N/A | N/A | 21923 | 21942 | ACAAAAGCACGCGCTGTAGC | 17 | 1010 |
| 1128430 | N/A | N/A | 22089 | 22108 | ACGAGGAGACTTGGCCACAC | 29 | 1011 |
| 1128462 | N/A | N/A | 24524 | 24543 | CTGTGTACAGAGCATCTAGT | 15 | 1012 |
| 1128494 | N/A | N/A | 24655 | 24674 | TAGGATCGGGCCAAGGTCCA | 0 | 1013 |
| 1128526 | N/A | N/A | 24751 | 24770 | TCTTGCTCCAAGATGCGGGA | 20 | 1014 |
| 1128558 | N/A | N/A | 24933 | 24952 | ACTTAGCTTCCCTCATCGCC | 0 | 1015 |
| 1128590 | N/A | N/A | 25440 | 25459 | CTACCCGGCCTAGGTATTTC | 2 | 1016 |
| 1128622 | N/A | N/A | 25571 | 25590 | TCGCGATCGGCCTGGTTCAT | 18 | 1017 |
| 1128654 | N/A | N/A | 25954 | 25973 | GACAGTTTCTGAGCCATACC | 47 | 1018 |
| 1128686 | N/A | N/A | 26342 | 26361 | GGGTGAGCTGAGGACCTCAC | 7 | 1019 |

TABLE 15
Reduction of GYS1 RNA by 5-10-5 MOE gapmers in A431 cells

| | SEQ | SEQ | SEQ | SEQ | | | |
|---|---|---|---|---|---|---|---|
| | ID | ID | ID | ID | | | |
| | NO: 1 | NO: 1 | NO: 2 | NO: 2 | | | SEQ |
| Compound | Start | Stop | Start | Stop | | % | ID |
| Number | Site | Site | Site | Site | Sequence (5′ to 3′) | Reduction | No. |
| 1126254 | 10 | 29 | 2657 | 2676 | CCTGCAGTGAAACCTCGCAG | 8 | 1020 |
| 1126286 | 137 | 156 | 2784 | 2803 | CGAGTAGCTGGTGCCCGACG | 50 | 1021 |
| 1126318 | 236 | 255 | 2883 | 2902 | CGGTTTAAAGGCATGGCTGG | 41 | 1022 |
| 1126350 | 413 | 432 | 4571 | 4590 | AGGAAGTAGTTGTCGCCCCA | 56 | 1023 |
| 1126382 | 650 | 669 | 8724 | 8743 | CACGGCACTCCGATGTTGCA | 28 | 1024 |
| 1126414 | 833 | 852 | 10065 | 10084 | GTGGTGAAGATGGTTGCTAC | 0 | 1025 |
| 1126446 | 979 | 998 | 10455 | 10474 | GAGCGCAGTGGGCTGCCGCC | 3 | 1026 |
| 1126478 | 1163 | 1182 | 13262 | 13281 | CCATAAAAATGGCCCCGCAC | 0 | 1027 |
| 1126510 | 1307 | 1326 | 14368 | 14387 | ACTGTCTGCTCGCTGCCGTT | 28 | 1028 |
| 1126542 | 1441 | 1460 | 17874 | 17893 | ATTCATAAAGCTTCCTCCCG | 24 | 1029 |
| 1126574 | 1619 | 1638 | 21337 | 21356 | AAGAGGCCGATTCGGCGGAT | 0 | 1030 |
| 1126606 | 1726 | 1745 | 21724 | 21743 | GGTGACAGCCACGGACAAAC | 39 | 1031 |
| 1126638 | 1912 | 1931 | 25317 | 25336 | AGGAATCATCCAGGCTGCGG | 14 | 1032 |
| 1126670 | 2012 | 2031 | 25417 | 25436 | TCCAGAAGGTCGGAGAGGCG | 14 | 1033 |
| 1126702 | 2169 | 2188 | 26427 | 26446 | TGACAGCGAGGGCGACGGTG | 20 | 1034 |
| 1126734 | 2304 | 2323 | 26562 | 26581 | CGGCCACTCTGGTGCACGGA | 20 | 1035 |
| 1126766 | 2513 | 2532 | 26771 | 26790 | GTTTAGGAGCAGCACCCCTC | 21 | 1036 |
| 1126798 | 2742 | 2761 | 27000 | 27019 | AACCTCTGGCACCACCGCAG | 53 | 1037 |
| 1126830 | 2904 | 2923 | 27162 | 27181 | GGACTTGATCGCCCCATTCG | 42 | 1038 |
| 1126862 | 3051 | 3070 | 27309 | 27328 | AGCCGGATGGAGGGATCCTC | 22 | 1039 |
| 1126894 | 3315 | 3334 | 27573 | 27592 | GACCTAGAACCTAGTGGTTT | 0 | 1040 |
| 1126926 | 3561 | 3580 | 27819 | 27838 | CTCCGGACACACTCCAATCA | 26 | 1041 |
| 1126958 | N/A | N/A | 3074 | 3093 | TAGCCCCGTCCTCCTACAAC | 3 | 1042 |
| 1126990 | N/A | N/A | 3210 | 3229 | CTAGGACCCAGAACCCGGGC | 18 | 1043 |
| 1127022 | N/A | N/A | 3344 | 3363 | AAACCCCGGCAGCTTCCCAG | 50 | 1044 |
| 1127054 | N/A | N/A | 3386 | 3405 | GAGTTTTATCCCCTAGACCA | 61 | 1045 |
| 1127086 | N/A | N/A | 3546 | 3565 | CTCCTAGGAACTAATAGCTC | 5 | 1046 |
| 1127118 | N/A | N/A | 3833 | 3852 | GGTGTTCACGGGCCCCCTCT | 3 | 1047 |
| 1127150 | N/A | N/A | 4096 | 4115 | GTTTAAATCGCAGCCAGGCT | 30 | 1048 |
| 1127182 | N/A | N/A | 4367 | 4386 | AGCCCATAGTTTGGAGTAGG | 54 | 1049 |
| 1127214 | N/A | N/A | 4818 | 4837 | TATCACGCCTCCTTCCTGTG | 36 | 1050 |
| 1127246 | N/A | N/A | 4976 | 4995 | GCTGTCTTTCGATCTTGCTC | 16 | 1051 |
| 1127278 | N/A | N/A | 5414 | 5433 | GACAATCACCGCCCACACAA | 39 | 1052 |
| 1127310 | N/A | N/A | 5886 | 5905 | CGGACCTGAATGGATTCCAG | 29 | 1053 |
| 1127342 | N/A | N/A | 5970 | 5989 | GGCTATTCTTAGGCCCCCAG | 32 | 1054 |
| 1127374 | N/A | N/A | 6261 | 6280 | GGCCACGCCACACATTTCTA | 0 | 1055 |
| 1127406 | N/A | N/A | 7664 | 7683 | TAATTCCTTCCACGGGATGC | 29 | 1056 |
| 1127438 | N/A | N/A | 8504 | 8523 | TCTATAGACTTAAGCCTCAG | 44 | 1057 |
| 1127470 | N/A | N/A | 8894 | 8913 | GACCCTATGACTCCCAGAAT | 21 | 1058 |
| 1127502 | N/A | N/A | 8973 | 8992 | TGAAGTTGGCATCGAGAGTA | 49 | 1059 |
| 1127534 | N/A | N/A | 9081 | 9100 | GCAATATCACACTAGAGAAC | 58 | 1060 |
| 1127566 | N/A | N/A | 9613 | 9632 | CCCTTGTCTCAAGGGTACGC | 20 | 1061 |
| 1127598 | N/A | N/A | 9700 | 9719 | TTGGCCAACCATCTAAGTCC | 27 | 1062 |
| 1127630 | N/A | N/A | 9836 | 9855 | ACAGAGTGGGCAGCGGCCCA | 0 | 1063 |
| 1127662 | N/A | N/A | 9917 | 9936 | TCCACGAGTGTTGGGAAAAG | 0 | 1064 |
| 1127694 | N/A | N/A | 10359 | 10378 | GCAGTCCGGTTAGAAGGATT | 0 | 1065 |
| 1127726 | N/A | N/A | 12004 | 12023 | TAGGACTTAGGATGGTCCAA | 15 | 1066 |
| 1127758 | N/A | N/A | 12260 | 12279 | ATGCCCAGTTCTGACCTAAC | 29 | 1067 |
| 1127790 | N/A | N/A | 12352 | 12371 | TGGAACATATAGAGCTAACC | 68 | 1068 |
| 1127822 | N/A | N/A | 12632 | 12651 | GCTTAGGTTCACAAGCACAA | 51 | 1069 |
| 1127854 | N/A | N/A | 13330 | 13349 | CCCCAGACCTAGATGGTTAG | 0 | 1070 |
| 1127886 | N/A | N/A | 13577 | 13596 | CAAAGCCCTCACCCGCTAGC | 12 | 1071 |
| 1127918 | N/A | N/A | 14188 | 14207 | CTCTATACTCCCCTCACGGC | 15 | 1072 |
| 1127950 | N/A | N/A | 14470 | 14489 | GGAGCGAGGGCTGCTAACCA | 8 | 1073 |
| 1127954 | N/A | N/A | 15654 | 15673 | CCGTCTACAGGATTTTCTAG | 95 | 83 |
| 1127983 | N/A | N/A | 15826 | 15845 | CGTCTCAATCATGCCTCGGG | 91 | 1074 |
| 1128015 | N/A | N/A | 16772 | 16791 | CTTAGGCACACAAGTAAAGC | 72 | 1075 |
| 1128047 | N/A | N/A | 17029 | 17048 | CGTGCCTGACATCAGCTGTG | 36 | 1076 |
| 1128079 | N/A | N/A | 17837 | 17856 | GTTGGCCGTGTCCCTGGAGG | 46 | 1077 |
| 1128111 | N/A | N/A | 18189 | 18208 | TAGATCCCTTCATAAAGGGC | 7 | 1078 |
| 1128143 | N/A | N/A | 18337 | 18356 | GCTCATTGACCCCAGAATCC | 53 | 1079 |
| 1128175 | N/A | N/A | 19355 | 19374 | CCTAAAGTGGCCCGATAAAA | 15 | 1080 |
| 1128207 | N/A | N/A | 19563 | 19582 | TTGGGCCCCTAGACTCAATA | 15 | 1081 |
| 1128239 | N/A | N/A | 19774 | 19793 | TATAGGTTAGCCAAAAGCAG | 23 | 1082 |
| 1128271 | N/A | N/A | 19876 | 19895 | ACCACTCTACTGAGTCTAGG | 37 | 1083 |
| 1128303 | N/A | N/A | 21105 | 21124 | GTTGTGGATTCCCACTAGTA | 32 | 1084 |
| 1128335 | N/A | N/A | 21610 | 21629 | GCCTTATTTAGCTAAGCCCT | 10 | 1085 |
| 1128367 | N/A | N/A | 21820 | 21839 | AGCTCTGACTAGGATGCCAT | 0 | 1086 |
| 1128399 | N/A | N/A | 21924 | 21943 | CACAAAAGCACGCGCTGTAG | 11 | 1087 |
| 1128431 | N/A | N/A | 22090 | 22109 | TACGAGGAGACTTGGCCACA | 20 | 1088 |
| 1128463 | N/A | N/A | 24526 | 24545 | CCCTGTGTACAGAGCATCTA | 16 | 1089 |
| 1128495 | N/A | N/A | 24656 | 24675 | GTAGGATCGGGCCAAGGTCC | 19 | 1090 |
| 1128527 | N/A | N/A | 24752 | 24771 | CTCTTGCTCCAAGATGCGGG | 26 | 1091 |
| 1128559 | N/A | N/A | 24934 | 24953 | CACTTAGCTTCCCTCATCGC | 12 | 1092 |
| 1128591 | N/A | N/A | 25441 | 25460 | CCTACCCGGCCTAGGTATTT | 5 | 1093 |
| 1128623 | N/A | N/A | 25572 | 25591 | ATCGCGATCGGCCTGGTTCA | 5 | 1094 |
| 1128655 | N/A | N/A | 25985 | 26004 | CCCCTTATGTAGATAAGCAG | 17 | 1095 |
| 1128687 | N/A | N/A | 26353 | 26372 | GGTGCAAACCAGGGTGAGCT | 17 | 1096 |

TABLE 16
Reduction of GYS1 RNA by 5-10-5 MOE gapmers in A431 cells

| | SEQ | SEQ | SEQ | SEQ | | | |
|---|---|---|---|---|---|---|---|
| | ID | ID | ID | ID | | | |
| | NO: 1 | NO: 1 | NO: 2 | NO: 2 | | | SEQ |
| Compound | Start | Stop | Start | Stop | | % | ID |
| Number | Site | Site | Site | Site | Sequence (5′ to 3′) | Reduction | No. |
| 1126255 | 11 | 30 | 2658 | 2677 | CCCTGCAGTGAAACCTCGCA | 0 | 1097 |
| 1126287 | 161 | 180 | 2808 | 2827 | AATGCACCAGGTAGGGTGCG | 0 | 1098 |
| 1126319 | 237 | 256 | 2884 | 2903 | GCGGTTTAAAGGCATGGCTG | 51 | 1099 |
| 1126351 | 415 | 434 | 4573 | 4592 | CCAGGAAGTAGTTGTCGCCC | 64 | 1100 |
| 1126383 | 652 | 671 | 8726 | 8745 | ACCACGGCACTCCGATGTTG | 45 | 1101 |
| 1126415 | 871 | 890 | 10103 | 10122 | CACCGGCACACAGGTAGCGC | 5 | 1102 |
| 1126447 | 981 | 1000 | 10457 | 10476 | GTGAGCGCAGTGGGCTGCCG | 0 | 1103 |
| 1126479 | 1190 | 1209 | 13633 | 13652 | GTCTTGTCCAAGTTGAAGTC | 33 | 1104 |
| 1126511 | 1308 | 1327 | 14369 | 14388 | CACTGTCTGCTCGCTGCCGT | 27 | 1105 |
| 1126543 | 1443 | 1462 | 17876 | 17895 | GGATTCATAAAGCTTCCTCC | 27 | 1106 |
| 1126575 | 1621 | 1640 | 21339 | 21358 | TGAAGAGGCCGATTCGGCGG | 18 | 1107 |
| 1126607 | 1730 | 1749 | 21728 | 21747 | CCAAGGTGACAGCCACGGAC | 8 | 1108 |
| 1126639 | 1913 | 1932 | 25318 | 25337 | CAGGAATCATCCAGGCTGCG | 0 | 1109 |
| 1126671 | 2020 | 2039 | 25425 | 25444 | ATTTCCAGTCCAGAAGGTCG | 7 | 1110 |
| 1126703 | 2170 | 2189 | 26428 | 26447 | GTGACAGCGAGGGCGACGGT | 31 | 1111 |
| 1126735 | 2306 | 2325 | 26564 | 26583 | CGCGGCCACTCTGGTGCACG | 0 | 1112 |
| 1126767 | 2514 | 2533 | 26772 | 26791 | GGTTTAGGAGCAGCACCCCT | 33 | 1113 |
| 1126799 | 2743 | 2762 | 27001 | 27020 | AAACCTCTGGCACCACCGCA | 44 | 1114 |
| 1126831 | 2905 | 2924 | 27163 | 27182 | TGGACTTGATCGCCCCATTC | 42 | 1115 |
| 1126863 | 3052 | 3071 | 27310 | 27329 | GAGCCGGATGGAGGGATCCT | 27 | 1116 |
| 1126895 | 3316 | 3335 | 27574 | 27593 | GGACCTAGAACCTAGTGGTT | 28 | 1117 |
| 1126927 | 3562 | 3581 | 27820 | 27839 | TCTCCGGACACACTCCAATC | 48 | 1118 |
| 1126959 | N/A | N/A | 3075 | 3094 | GTAGCCCCGTCCTCCTACAA | 5 | 1119 |
| 1126991 | N/A | N/A | 3212 | 3231 | CCCTAGGACCCAGAACCCGG | 20 | 1120 |
| 1127023 | N/A | N/A | 3345 | 3364 | GAAACCCCGGCAGCTTCCCA | 56 | 1121 |
| 1127055 | N/A | N/A | 3387 | 3406 | GGAGTTTTATCCCCTAGACC | 80 | 1122 |
| 1127087 | N/A | N/A | 3547 | 3566 | ACTCCTAGGAACTAATAGCT | 20 | 1123 |
| 1127119 | N/A | N/A | 3842 | 3861 | ACCCGGCTGGGTGTTCACGG | 15 | 1124 |
| 1127151 | N/A | N/A | 4097 | 4116 | GGTTTAAATCGCAGCCAGGC | 33 | 1125 |
| 1127183 | N/A | N/A | 4368 | 4387 | GAGCCCATAGTTTGGAGTAG | 45 | 1126 |
| 1127215 | N/A | N/A | 4822 | 4841 | GTCCTATCACGCCTCCTTCC | 77 | 1127 |
| 1127247 | N/A | N/A | 4977 | 4996 | GGCTGTCTTTCGATCTTGCT | 48 | 1128 |
| 1127279 | N/A | N/A | 5415 | 5434 | TGACAATCACCGCCCACACA | 40 | 1129 |
| 1127311 | N/A | N/A | 5887 | 5906 | TCGGACCTGAATGGATTCCA | 61 | 1130 |
| 1127343 | N/A | N/A | 6034 | 6053 | AGCCTCGCTCTGAGGTCCCT | 0 | 1131 |
| 1127375 | N/A | N/A | 6262 | 6281 | CGGCCACGCCACACATTTCT | 0 | 1132 |
| 1127407 | N/A | N/A | 7665 | 7684 | CTAATTCCTTCCACGGGATG | 22 | 1133 |
| 1127439 | N/A | N/A | 8505 | 8524 | GTCTATAGACTTAAGCCTCA | 49 | 1134 |
| 1127471 | N/A | N/A | 8895 | 8914 | GGACCCTATGACTCCCAGAA | 31 | 1135 |
| 1127503 | N/A | N/A | 8974 | 8993 | ATGAAGTTGGCATCGAGAGT | 54 | 1136 |
| 1127535 | N/A | N/A | 9084 | 9103 | CCAGCAATATCACACTAGAG | 92 | 1137 |
| 1127567 | N/A | N/A | 9614 | 9633 | CCCCTTGTCTCAAGGGTACG | 0 | 1138 |
| 1127599 | N/A | N/A | 9701 | 9720 | TTTGGCCAACCATCTAAGTC | 2 | 1139 |
| 1127631 | N/A | N/A | 9845 | 9864 | CACTACTGCACAGAGTGGGC | 1 | 1140 |
| 1127663 | N/A | N/A | 9918 | 9937 | CTCCACGAGTGTTGGGAAAA | 19 | 1141 |
| 1127695 | N/A | N/A | 10360 | 10379 | AGCAGTCCGGTTAGAAGGAT | 11 | 1142 |
| 1127727 | N/A | N/A | 12005 | 12024 | TTAGGACTTAGGATGGTCCA | 4 | 1143 |
| 1127759 | N/A | N/A | 12262 | 12281 | GAATGCCCAGTTCTGACCTA | 25 | 1144 |
| 1127791 | N/A | N/A | 12357 | 12376 | AGTTCTGGAACATATAGAGC | 69 | 1145 |
| 1127823 | N/A | N/A | 12640 | 12659 | TATTACTTGCTTAGGTTCAC | 82 | 1146 |
| 1127855 | N/A | N/A | 13331 | 13350 | CCCCCAGACCTAGATGGTTA | 12 | 1147 |
| 1127887 | N/A | N/A | 13578 | 13597 | CCAAAGCCCTCACCCGCTAG | 14 | 1148 |
| 1127919 | N/A | N/A | 14189 | 14208 | TCTCTATACTCCCCTCACGG | 25 | 1149 |
| 1127951 | N/A | N/A | 14472 | 14491 | CCGGAGCGAGGGCTGCTAAC | 12 | 1150 |
| 1127954 | N/A | N/A | 15654 | 15673 | CCGTCTACAGGATTTTCTAG | 94 | 83 |
| 1127984 | N/A | N/A | 15844 | 15863 | CCATGGGACTCCCCACCGCG | 34 | 1151 |
| 1128016 | N/A | N/A | 16777 | 16796 | GACCACTTAGGCACACAAGT | 93 | 1152 |
| 1128048 | N/A | N/A | 17048 | 17067 | CTGGAAGGCTTAGGACCCAC | 51 | 1153 |
| 1128080 | N/A | N/A | 17838 | 17857 | TGTTGGCCGTGTCCCTGGAG | 48 | 1154 |
| 1128112 | N/A | N/A | 18190 | 18209 | ATAGATCCCTTCATAAAGGG | 0 | 1155 |
| 1128144 | N/A | N/A | 18859 | 18878 | TAGTGTGGGATCTGGCTCTG | 35 | 1156 |
| 1128176 | N/A | N/A | 19356 | 19375 | CCCTAAAGTGGCCCGATAAA | 0 | 1157 |
| 1128208 | N/A | N/A | 19564 | 19583 | TTTGGGCCCCTAGACTCAAT | 0 | 1158 |
| 1128240 | N/A | N/A | 19776 | 19795 | ATTATAGGTTAGCCAAAAGC | 25 | 1159 |
| 1128272 | N/A | N/A | 19877 | 19896 | CACCACTCTACTGAGTCTAG | 23 | 1160 |
| 1128304 | N/A | N/A | 21107 | 21126 | GAGTTGTGGATTCCCACTAG | 42 | 1161 |
| 1128336 | N/A | N/A | 21611 | 21630 | TGCCTTATTTAGCTAAGCCC | 15 | 1162 |
| 1128368 | N/A | N/A | 21821 | 21840 | TAGCTCTGACTAGGATGCCA | 20 | 1163 |
| 1128400 | N/A | N/A | 21925 | 21944 | TCACAAAAGCACGCGCTGTA | 4 | 1164 |
| 1128432 | N/A | N/A | 22091 | 22110 | TTACGAGGAGACTTGGCCAC | 5 | 1165 |
| 1128464 | N/A | N/A | 24544 | 24563 | GTCTCTCATTATTAGTATCC | 41 | 1166 |
| 1128496 | N/A | N/A | 24657 | 24676 | TGTAGGATCGGGCCAAGGTC | 45 | 1167 |
| 1128528 | N/A | N/A | 24753 | 24772 | GCTCTTGCTCCAAGATGCGG | 0 | 1168 |
| 1128560 | N/A | N/A | 24935 | 24954 | CCACTTAGCTTCCCTCATCG | 9 | 1169 |
| 1128592 | N/A | N/A | 25442 | 25461 | TCCTACCCGGCCTAGGTATT | 18 | 1170 |
| 1128624 | N/A | N/A | 25573 | 25592 | CATCGCGATCGGCCTGGTTC | 0 | 1171 |
| 1128656 | N/A | N/A | 25986 | 26005 | ACCCCTTATGTAGATAAGCA | 8 | 1172 |
| 1128688 | N/A | N/A | 26360 | 26379 | CGATGTGGGTGCAAACCAGG | 0 | 1173 |

TABLE 17
Reduction of GYS1 RNA by 5-10-5 MOE gapmers in A431 cells

| | SEQ | SEQ | SEQ | SEQ | | | |
|---|---|---|---|---|---|---|---|
| | ID | ID | ID | ID | | | |
| | NO: 1 | NO: 1 | NO: 2 | NO: 2 | | | SEQ |
| Compound | Start | Stop | Start | Stop | | % | ID |
| Number | Site | Site | Site | Site | Sequence (5′ to 3′) | Reduction | No. |
| 1126256 | 13 | 32 | 2660 | 2679 | GCCCCTGCAGTGAAACCTCG | 20 | 1174 |
| 1126288 | 162 | 181 | 2809 | 2828 | GAATGCACCAGGTAGGGTGC | 13 | 1175 |
| 1126320 | 239 | 258 | 2886 | 2905 | GTGCGGTTTAAAGGCATGGC | 42 | 1176 |
| 1126352 | 416 | 435 | 4574 | 4593 | ACCAGGAAGTAGTTGTCGCC | 44 | 1177 |
| 1126384 | 653 | 672 | 8727 | 8746 | TACCACGGCACTCCGATGTT | 17 | 1178 |
| 1126416 | 872 | 891 | 10104 | 10123 | GCACCGGCACACAGGTAGCG | 30 | 1179 |
| 1126448 | 982 | 1001 | 10458 | 10477 | CGTGAGCGCAGTGGGCTGCC | 4 | 1180 |
| 1126480 | 1195 | 1214 | 13638 | 13657 | ATAAGGTCTTGTCCAAGTTG | 54 | 1181 |
| 1126512 | 1311 | 1330 | 14372 | 14391 | AACCACTGTCTGCTCGCTGC | 59 | 1182 |
| 1126544 | 1450 | 1469 | 17883 | 17902 | CCAGTAAGGATTCATAAAGC | 11 | 1183 |
| 1126576 | 1622 | 1641 | 21340 | 21359 | TTGAAGAGGCCGATTCGGCG | 0 | 1184 |
| 1126608 | 1731 | 1750 | 21729 | 21748 | TCCAAGGTGACAGCCACGGA | 17 | 1185 |
| 1126640 | 1918 | 1937 | 25323 | 25342 | GCGAGCAGGAATCATCCAGG | 24 | 1186 |
| 1126672 | 2030 | 2049 | 25435 | 25454 | CGGCCTAGGTATTTCCAGTC | 5 | 1187 |
| 1126704 | 2229 | 2248 | 26487 | 26506 | CTCCAGCGGCCCGTTCCGGG | 5 | 1188 |
| 1126736 | 2307 | 2326 | 26565 | 26584 | GCGCGGCCACTCTGGTGCAC | 0 | 1189 |
| 1126768 | 2534 | 2553 | 26792 | 26811 | CAGTGCAGATCTGGAGCGGG | 57 | 1190 |
| 1126800 | 2744 | 2763 | 27002 | 27021 | AAAACCTCTGGCACCACCGC | 45 | 1191 |
| 1126832 | 2906 | 2925 | 27164 | 27183 | CTGGACTTGATCGCCCCATT | 52 | 1192 |
| 1126864 | 3054 | 3073 | 27312 | 27331 | AGGAGCCGGATGGAGGGATC | 29 | 1193 |
| 1126896 | 3341 | 3360 | 27599 | 27618 | GGTAAGGTTCCAGATCTAGA | 81 | 1194 |
| 1126928 | 3563 | 3582 | 27821 | 27840 | ATCTCCGGACACACTCCAAT | 58 | 1195 |
| 1126960 | N/A | N/A | 3076 | 3095 | AGTAGCCCCGTCCTCCTACA | 3 | 1196 |
| 1126992 | N/A | N/A | 3213 | 3232 | TCCCTAGGACCCAGAACCCG | 18 | 1197 |
| 1127024 | N/A | N/A | 3349 | 3368 | GTCTGAAACCCCGGCAGCTT | 45 | 1198 |
| 1127056 | N/A | N/A | 3388 | 3407 | TGGAGTTTTATCCCCTAGAC | 49 | 1199 |
| 1127088 | N/A | N/A | 3548 | 3567 | TACTCCTAGGAACTAATAGC | 42 | 1200 |
| 1127120 | N/A | N/A | 3843 | 3862 | TACCCGGCTGGGTGTTCACG | 11 | 1201 |
| 1127152 | N/A | N/A | 4098 | 4117 | GGGTTTAAATCGCAGCCAGG | 32 | 1202 |
| 1127184 | N/A | N/A | 4369 | 4388 | GGAGCCCATAGTTTGGAGTA | 38 | 1203 |
| 1127216 | N/A | N/A | 4823 | 4842 | TGTCCTATCACGCCTCCTTC | 64 | 1204 |
| 1127248 | N/A | N/A | 4978 | 4997 | AGGCTGTCTTTCGATCTTGC | 79 | 1205 |
| 1127280 | N/A | N/A | 5416 | 5435 | ATGACAATCACCGCCCACAC | 41 | 1206 |
| 1127312 | N/A | N/A | 5888 | 5907 | GTCGGACCTGAATGGATTCC | 36 | 1207 |
| 1127344 | N/A | N/A | 6057 | 6076 | CGACCTGGCTTTTTGCTGCC | 84 | 1208 |
| 1127376 | N/A | N/A | 6263 | 6282 | TCGGCCACGCCACACATTTC | 18 | 1209 |
| 1127408 | N/A | N/A | 7666 | 7685 | GCTAATTCCTTCCACGGGAT | 73 | 1210 |
| 1127440 | N/A | N/A | 8506 | 8525 | TGTCTATAGACTTAAGCCTC | 46 | 1211 |
| 1127472 | N/A | N/A | 8896 | 8915 | AGGACCCTATGACTCCCAGA | 49 | 1212 |
| 1127504 | N/A | N/A | 8977 | 8996 | TAAATGAAGTTGGCATCGAG | 66 | 1213 |
| 1127536 | N/A | N/A | 9086 | 9105 | GTCCAGCAATATCACACTAG | 70 | 1214 |
| 1127568 | N/A | N/A | 9615 | 9634 | ACCCCTTGTCTCAAGGGTAC | 1 | 1215 |
| 1127600 | N/A | N/A | 9703 | 9722 | TTTTTGGCCAACCATCTAAG | 40 | 1216 |
| 1127632 | N/A | N/A | 9846 | 9865 | CCACTACTGCACAGAGTGGG | 0 | 1217 |
| 1127664 | N/A | N/A | 9919 | 9938 | TCTCCACGAGTGTTGGGAAA | 0 | 1218 |
| 1127696 | N/A | N/A | 10361 | 10380 | CAGCAGTCCGGTTAGAAGGA | 0 | 1219 |
| 1127728 | N/A | N/A | 12007 | 12026 | GCTTAGGACTTAGGATGGTC | 87 | 1220 |
| 1127760 | N/A | N/A | 12285 | 12304 | GAACGGATACTAAGGGCTGG | 72 | 1221 |
| 1127792 | N/A | N/A | 12366 | 12385 | CTAGGGCAAAGTTCTGGAAC | 70 | 1222 |
| 1127824 | N/A | N/A | 12645 | 12664 | CCTAATATTACTTGCTTAGG | 10 | 1223 |
| 1127856 | N/A | N/A | 13332 | 13351 | TCCCCCAGACCTAGATGGTT | 20 | 1224 |
| 1127888 | N/A | N/A | 13587 | 13606 | CGGTAAAGCCCAAAGCCCTC | 16 | 1225 |
| 1127920 | N/A | N/A | 14190 | 14209 | GTCTCTATACTCCCCTCACG | 27 | 1226 |
| 1127952 | N/A | N/A | 15452 | 15471 | GTGAGTATCTCTGCTAATGA | 87 | 1227 |
| 1127954 | N/A | N/A | 15654 | 15673 | CCGTCTACAGGATTTTCTAG | 95 | 83 |
| 1127985 | N/A | N/A | 15845 | 15864 | CCCATGGGACTCCCCACCGC | 22 | 1228 |
| 1128017 | N/A | N/A | 16778 | 16797 | GGACCACTTAGGCACACAAG | 92 | 161 |
| 1128049 | N/A | N/A | 17050 | 17069 | CCCTGGAAGGCTTAGGACCC | 9 | 1229 |
| 1128081 | N/A | N/A | 17839 | 17858 | GTGTTGGCCGTGTCCCTGGA | 55 | 1230 |
| 1128113 | N/A | N/A | 18199 | 18218 | GACCTCAGAATAGATCCCTT | 26 | 1231 |
| 1128145 | N/A | N/A | 18860 | 18879 | CTAGTGTGGGATCTGGCTCT | 20 | 1232 |
| 1128177 | N/A | N/A | 19357 | 19376 | TCCCTAAAGTGGCCCGATAA | 22 | 1233 |
| 1128209 | N/A | N/A | 19565 | 19584 | TTTTGGGCCCCTAGACTCAA | 1 | 1234 |
| 1128241 | N/A | N/A | 19782 | 19801 | TTGGAAATTATAGGTTAGCC | 33 | 1235 |
| 1128273 | N/A | N/A | 19880 | 19899 | TACCACCACTCTACTGAGTC | 17 | 1236 |
| 1128305 | N/A | N/A | 21108 | 21127 | GGAGTTGTGGATTCCCACTA | 45 | 1237 |
| 1128337 | N/A | N/A | 21612 | 21631 | GTGCCTTATTTAGCTAAGCC | 6 | 1238 |
| 1128369 | N/A | N/A | 21822 | 21841 | CTAGCTCTGACTAGGATGCC | 33 | 1239 |
| 1128401 | N/A | N/A | 21926 | 21945 | ATCACAAAAGCACGCGCTGT | 16 | 1240 |
| 1128433 | N/A | N/A | 22092 | 22111 | CTTACGAGGAGACTTGGCCA | 21 | 1241 |
| 1128465 | N/A | N/A | 24545 | 24564 | GGTCTCTCATTATTAGTATC | 33 | 1242 |
| 1128497 | N/A | N/A | 24658 | 24677 | CTGTAGGATCGGGCCAAGGT | 24 | 1243 |
| 1128529 | N/A | N/A | 24754 | 24773 | TGCTCTTGCTCCAAGATGCG | 26 | 1244 |
| 1128561 | N/A | N/A | 24938 | 24957 | GACCCACTTAGCTTCCCTCA | 7 | 1245 |
| 1128593 | N/A | N/A | 25443 | 25462 | GTCCTACCCGGCCTAGGTAT | 21 | 1246 |
| 1128625 | N/A | N/A | 25574 | 25593 | CCATCGCGATCGGCCTGGTT | 17 | 1247 |
| 1128657 | N/A | N/A | 25987 | 26006 | CACCCCTTATGTAGATAAGC | 9 | 1248 |
| 1128689 | N/A | N/A | 26361 | 26380 | GCGATGTGGGTGCAAACCAG | 3 | 1249 |

TABLE 18
Reduction of GYS1 RNA by 5-10-5 MOE gapmers in A431 cells

| | SEQ | SEQ | SEQ | SEQ | | | |
|---|---|---|---|---|---|---|---|
| | ID | ID | ID | ID | | | |
| | NO: 1 | NO: 1 | NO: 2 | NO: 2 | | | SEQ |
| Compound | Start | Stop | Start | Stop | | % | ID |
| Number | Site | Site | Site | Site | Sequence (5′ to 3′) | Reduction | No. |
| 1126257 | 14 | 33 | 2661 | 2680 | CGCCCCTGCAGTGAAACCTC | 0 | 1250 |
| 1126289 | 163 | 182 | 2810 | 2829 | GGAATGCACCAGGTAGGGTG | 29 | 1251 |
| 1126321 | 240 | 259 | 2887 | 2906 | AGTGCGGTTTAAAGGCATGG | 38 | 1252 |
| 1126353 | 418 | 437 | 4576 | 4595 | CCACCAGGAAGTAGTTGTCG | 27 | 1253 |
| 1126385 | 654 | 673 | 8728 | 8747 | GTACCACGGCACTCCGATGT | 53 | 1254 |
| 1126417 | 874 | 893 | 10106 | 10125 | CGGCACCGGCACACAGGTAG | 51 | 1255 |
| 1126449 | 1009 | 1028 | 10485 | 10504 | CGGTGATCTGGGACACAGTA | 94† | 1256 |
| 1126481 | 1200 | 1219 | 13643 | 13662 | GAAGTATAAGGTCTTGTCCA | 64 | 1257 |
| 1126513 | 1312 | 1331 | 14373 | 14392 | CAACCACTGTCTGCTCGCTG | 44 | 1258 |
| 1126545 | 1472 | 1491 | 18000 | 18019 | TTCATGTCGGGAAGGCTCCC | 28 | 1259 |
| 1126577 | 1623 | 1642 | 21341 | 21360 | ATTGAAGAGGCCGATTCGGC | 2 | 1260 |
| 1126609 | 1758 | 1777 | 21756 | 21775 | CCAAGGCTCATAGTAGGAGG | 29 | 1261 |
| 1126641 | 1920 | 1939 | 25325 | 25344 | CTGCGAGCAGGAATCATCCA | 31 | 1262 |
| 1126673 | 2031 | 2050 | 25436 | 25455 | CCGGCCTAGGTATTTCCAGT | 6 | 1263 |
| 1126705 | 2231 | 2250 | 26489 | 26508 | TCCTCCAGCGGCCCGTTCCG | 6 | 1264 |
| 1126737 | 2308 | 2327 | 26566 | 26585 | GGCGCGGCCACTCTGGTGCA | 4 | 1265 |
| 1126769 | 2535 | 2554 | 26793 | 26812 | CCAGTGCAGATCTGGAGCGG | 36 | 1266 |
| 1126801 | 2745 | 2764 | 27003 | 27022 | TAAAACCTCTGGCACCACCG | 52 | 1267 |
| 1126833 | 2907 | 2926 | 27165 | 27184 | TCTGGACTTGATCGCCCCAT | 43 | 1268 |
| 1126865 | 3059 | 3078 | 27317 | 27336 | ATGACAGGAGCCGGATGGAG | 28 | 1269 |
| 1126897 | 3342 | 3361 | 27600 | 27619 | TGGTAAGGTTCCAGATCTAG | 62 | 1270 |
| 1126929 | 3564 | 3583 | 27822 | 27841 | CATCTCCGGACACACTCCAA | 49 | 1271 |
| 1126961 | N/A | N/A | 3077 | 3096 | TAGTAGCCCCGTCCTCCTAC | 0 | 1272 |
| 1126993 | N/A | N/A | 3239 | 3258 | CTAGGAGTCTCATTTTAGCG | 82 | 1273 |
| 1127025 | N/A | N/A | 3350 | 3369 | GGTCTGAAACCCCGGCAGCT | 37 | 1274 |
| 1127057 | N/A | N/A | 3390 | 3409 | TCTGGAGTTTTATCCCCTAG | 65 | 1275 |
| 1127089 | N/A | N/A | 3549 | 3568 | CTACTCCTAGGAACTAATAG | 27 | 1276 |
| 1127121 | N/A | N/A | 3844 | 3863 | ATACCCGGCTGGGTGTTCAC | 23 | 1277 |
| 1127153 | N/A | N/A | 4105 | 4124 | AGGAGCTGGGTTTAAATCGC | 33 | 1278 |
| 1127185 | N/A | N/A | 4371 | 4390 | TGGGAGCCCATAGTTTGGAG | 42 | 1279 |
| 1127217 | N/A | N/A | 4824 | 4843 | GTGTCCTATCACGCCTCCTT | 85 | 1280 |
| 1127249 | N/A | N/A | 4979 | 4998 | CAGGCTGTCTTTCGATCTTG | 86 | 1281 |
| 1127281 | N/A | N/A | 5417 | 5436 | AATGACAATCACCGCCCACA | 17 | 1282 |
| 1127313 | N/A | N/A | 5889 | 5908 | AGTCGGACCTGAATGGATTC | 80 | 1283 |
| 1127345 | N/A | N/A | 6058 | 6077 | CCGACCTGGCTTTTTGCTGC | 68 | 1284 |
| 1127377 | N/A | N/A | 6264 | 6283 | CTCGGCCACGCCACACATTT | 15 | 1285 |
| 1127409 | N/A | N/A | 7668 | 7687 | ATGCTAATTCCTTCCACGGG | 89 | 1286 |
| 1127441 | N/A | N/A | 8507 | 8526 | ATGTCTATAGACTTAAGCCT | 20 | 1287 |
| 1127473 | N/A | N/A | 8900 | 8919 | TTAAAGGACCCTATGACTCC | 8 | 1288 |
| 1127505 | N/A | N/A | 8978 | 8997 | GTAAATGAAGTTGGCATCGA | 71 | 1289 |
| 1127537 | N/A | N/A | 9124 | 9143 | GGGATTCATGAGCATCCAGG | 7 | 1290 |
| 1127569 | N/A | N/A | 9616 | 9635 | GACCCCTTGTCTCAAGGGTA | 4 | 1291 |
| 1127601 | N/A | N/A | 9706 | 9725 | GATTTTTTGGCCAACCATCT | 49 | 1292 |
| 1127633 | N/A | N/A | 9847 | 9866 | ACCACTACTGCACAGAGTGG | 9 | 1293 |
| 1127665 | N/A | N/A | 9923 | 9942 | ACTGTCTCCACGAGTGTTGG | 45 | 1294 |
| 1127697 | N/A | N/A | 10362 | 10381 | ACAGCAGTCCGGTTAGAAGG | 0 | 1295 |
| 1127729 | N/A | N/A | 12008 | 12027 | AGCTTAGGACTTAGGATGGT | 48 | 1296 |
| 1127761 | N/A | N/A | 12286 | 12305 | AGAACGGATACTAAGGGCTG | 41 | 1297 |
| 1127793 | N/A | N/A | 12387 | 12406 | AACTACAACCCCCATCAGCG | 4 | 1298 |
| 1127825 | N/A | N/A | 12681 | 12700 | GTGACACACCTACCCTGACT | 24 | 1299 |
| 1127857 | N/A | N/A | 13388 | 13407 | GAATACCCAGGTGCCCCCTC | 3 | 1300 |
| 1127889 | N/A | N/A | 13588 | 13607 | ACGGTAAAGCCCAAAGCCCT | 0 | 1301 |
| 1127921 | N/A | N/A | 14191 | 14210 | GGTCTCTATACTCCCCTCAC | 53 | 1302 |
| 1127953 | N/A | N/A | 15653 | 15672 | CGTCTACAGGATTTTCTAGA | 82 | 1303 |
| 1127954 | N/A | N/A | 15654 | 15673 | CCGTCTACAGGATTTTCTAG | 95 | 83 |
| 1127986 | N/A | N/A | 15866 | 15885 | TATGAGACATGTCACTCCAG | 66 | 1304 |
| 1128018 | N/A | N/A | 16781 | 16800 | AAAGGACCACTTAGGCACAC | 94 | 1305 |
| 1128050 | N/A | N/A | 17051 | 17070 | GCCCTGGAAGGCTTAGGACC | 1 | 1306 |
| 1128082 | N/A | N/A | 17840 | 17859 | CGTGTTGGCCGTGTCCCTGG | 50 | 1307 |
| 1128114 | N/A | N/A | 18202 | 18221 | GTGGACCTCAGAATAGATCC | 0 | 1308 |
| 1128146 | N/A | N/A | 18861 | 18880 | GCTAGTGTGGGATCTGGCTC | 22 | 1309 |
| 1128178 | N/A | N/A | 19358 | 19377 | GTCCCTAAAGTGGCCCGATA | 10 | 1310 |
| 1128210 | N/A | N/A | 19566 | 19585 | TTTTTGGGCCCCTAGACTCA | 23 | 1311 |
| 1128242 | N/A | N/A | 19788 | 19807 | GGACTATTGGAAATTATAGG | 28 | 1312 |
| 1128274 | N/A | N/A | 19882 | 19901 | CTTACCACCACTCTACTGAG | 0 | 1313 |
| 1128306 | N/A | N/A | 21109 | 21128 | AGGAGTTGTGGATTCCCACT | 22 | 1314 |
| 1128338 | N/A | N/A | 21613 | 21632 | AGTGCCTTATTTAGCTAAGC | 21 | 1315 |
| 1128370 | N/A | N/A | 21823 | 21842 | GCTAGCTCTGACTAGGATGC | 11 | 1316 |
| 1128402 | N/A | N/A | 21927 | 21946 | TATCACAAAAGCACGCGCTG | 16 | 1317 |
| 1128434 | N/A | N/A | 22093 | 22112 | TCTTACGAGGAGACTTGGCC | 0 | 1318 |
| 1128466 | N/A | N/A | 24556 | 24575 | GGGTAAGATAAGGTCTCTCA | 53 | 1319 |
| 1128498 | N/A | N/A | 24659 | 24678 | CCTGTAGGATCGGGCCAAGG | 25 | 1320 |
| 1128530 | N/A | N/A | 24836 | 24855 | CGTCGCTGAGCCCCCACAAC | 7 | 1321 |
| 1128562 | N/A | N/A | 24940 | 24959 | GAGACCCACTTAGCTTCCCT | 0 | 1322 |
| 1128594 | N/A | N/A | 25444 | 25463 | GGTCCTACCCGGCCTAGGTA | 0 | 1323 |
| 1128626 | N/A | N/A | 25575 | 25594 | ACCATCGCGATCGGCCTGGT | 57 | 1324 |
| 1128658 | N/A | N/A | 25988 | 26007 | CCACCCCTTATGTAGATAAG | 0 | 1325 |
| 1128690 | N/A | N/A | 26362 | 26381 | GGCGATGTGGGTGCAAACCA | 0 | 1326 |

TABLE 19
Reduction of GYS1 RNA by 5-10-5 MOE gapmers in A431 cells

| | SEQ | SEQ | SEQ | SEQ | | | |
|---|---|---|---|---|---|---|---|
| | ID | ID | ID | ID | | | |
| | NO: 1 | NO: 1 | NO: 2 | NO: 2 | | | SEQ |
| Compound | Start | Stop | Start | Stop | | % | ID |
| Number | Site | Site | Site | Site | Sequence (5′ to 3′) | Reduction | No. |
| 1126258 | 53 | 72 | 2700 | 2719 | CTAGGCAGAAGGAGGCCGCA | 6 | 1327 |
| 1126290 | 167 | 186 | 2814 | 2833 | CTAGGGAATGCACCAGGTAG | 60 | 1328 |
| 1126322 | 241 | 260 | 2888 | 2907 | AAGTGCGGTTTAAAGGCATG | 16 | 1329 |
| 1126354 | 422 | 441 | 4580 | 4599 | GGCCCCACCAGGAAGTAGTT | 1 | 1330 |
| 1126386 | 771 | 790 | 10003 | 10022 | CAACCACTCATGGAAGTGAG | 39 | 1331 |
| 1126418 | 875 | 894 | 10107 | 10126 | ACGGCACCGGCACACAGGTA | 45 | 1332 |
| 1126450 | 1010 | 1029 | 10486 | 10505 | GCGGTGATCTGGGACACAGT | 90† | 1333 |
| 1126482 | 1211 | 1230 | 13654 | 13673 | CCGGCGATAAAGAAGTATAA | 53 | 1334 |
| 1126514 | 1315 | 1334 | 14376 | 14395 | AGGCAACCACTGTCTGCTCG | 12 | 1335 |
| 1126546 | 1473 | 1492 | 18001 | 18020 | GTTCATGTCGGGAAGGCTCC | 37 | 1336 |
| 1126578 | 1624 | 1643 | 21342 | 21361 | TATTGAAGAGGCCGATTCGG | 0 | 1337 |
| 1126610 | 1759 | 1778 | 21757 | 21776 | CCCAAGGCTCATAGTAGGAG | 35 | 1338 |
| 1126642 | 1922 | 1941 | 25327 | 25346 | AGCTGCGAGCAGGAATCATC | 33 | 1339 |
| 1126674 | 2050 | 2069 | 26145 | 26164 | GGCGCGCAGACATATAGTAC | 13 | 1340 |
| 1126706 | 2232 | 2251 | 26490 | 26509 | TTCCTCCAGCGGCCCGTTCC | 27 | 1341 |
| 1126738 | 2310 | 2329 | 26568 | 26587 | TCGGCGCGGCCACTCTGGTG | 6 | 1342 |
| 1126770 | 2575 | 2594 | 26833 | 26852 | AGTGTTTGGCGGACTGGGTG | 54 | 1343 |
| 1126802 | 2809 | 2828 | 27067 | 27086 | GAATTTGTAAGCCACACGGG | 54 | 1344 |
| 1126834 | 2908 | 2927 | 27166 | 27185 | CTCTGGACTTGATCGCCCCA | 51 | 1345 |
| 1126866 | 3060 | 3079 | 27318 | 27337 | GATGACAGGAGCCGGATGGA | 51 | 1346 |
| 1126898 | 3343 | 3362 | 27601 | 27620 | GTGGTAAGGTTCCAGATCTA | 79 | 1347 |
| 1126930 | 3567 | 3586 | 27825 | 27844 | TCTCATCTCCGGACACACTC | 75 | 1348 |
| 1126962 | N/A | N/A | 3078 | 3097 | CTAGTAGCCCCGTCCTCCTA | 30 | 1349 |
| 1126994 | N/A | N/A | 3266 | 3285 | AGTCTCTCGGAAGCCTGCCT | 63 | 1350 |
| 1127026 | N/A | N/A | 3351 | 3370 | AGGTCTGAAACCCCGGCAGC | 49 | 1351 |
| 1127058 | N/A | N/A | 3430 | 3449 | CCGCTCAGGCCTCCTATCTC | 46 | 1352 |
| 1127090 | N/A | N/A | 3576 | 3595 | CGCATGTGTCCCAGGCCATG | 58 | 1353 |
| 1127122 | N/A | N/A | 3845 | 3864 | GATACCCGGCTGGGTGTTCA | 16 | 1354 |
| 1127154 | N/A | N/A | 4126 | 4145 | GTTCCCGAGTTCCCAGCTCA | 49 | 1355 |
| 1127186 | N/A | N/A | 4372 | 4391 | CTGGGAGCCCATAGTTTGGA | 48 | 1356 |
| 1127218 | N/A | N/A | 4825 | 4844 | GGTGTCCTATCACGCCTCCT | 23 | 1357 |
| 1127250 | N/A | N/A | 4981 | 5000 | ACCAGGCTGTCTTTCGATCT | 78 | 1358 |
| 1127282 | N/A | N/A | 5418 | 5437 | CAATGACAATCACCGCCCAC | 17 | 1359 |
| 1127314 | N/A | N/A | 5890 | 5909 | CAGTCGGACCTGAATGGATT | 61 | 1360 |
| 1127346 | N/A | N/A | 6059 | 6078 | GCCGACCTGGCTTTTTGCTG | 11 | 1361 |
| 1127378 | N/A | N/A | 6265 | 6284 | CCTCGGCCACGCCACACATT | 30 | 1362 |
| 1127410 | N/A | N/A | 7669 | 7688 | GATGCTAATTCCTTCCACGG | 95 | 1363 |
| 1127442 | N/A | N/A | 8508 | 8527 | GATGTCTATAGACTTAAGCC | 31 | 1364 |
| 1127474 | N/A | N/A | 8901 | 8920 | ATTAAAGGACCCTATGACTC | 24 | 1365 |
| 1127506 | N/A | N/A | 8979 | 8998 | AGTAAATGAAGTTGGCATCG | 81 | 1366 |
| 1127538 | N/A | N/A | 9146 | 9165 | GGGTCAAAACCAGGTCAGGC | 80 | 1367 |
| 1127570 | N/A | N/A | 9617 | 9636 | AGACCCCTTGTCTCAAGGGT | 8 | 1368 |
| 1127602 | N/A | N/A | 9707 | 9726 | GGATTTTTTGGCCAACCATC | 73 | 1369 |
| 1127634 | N/A | N/A | 9848 | 9867 | CACCACTACTGCACAGAGTG | 7 | 1370 |
| 1127666 | N/A | N/A | 9924 | 9943 | CACTGTCTCCACGAGTGTTG | 15 | 1371 |
| 1127698 | N/A | N/A | 10363 | 10382 | GACAGCAGTCCGGTTAGAAG | 9 | 1372 |
| 1127730 | N/A | N/A | 12009 | 12028 | CAGCTTAGGACTTAGGATGG | 61 | 1373 |
| 1127762 | N/A | N/A | 12287 | 12306 | GAGAACGGATACTAAGGGCT | 83 | 1374 |
| 1127794 | N/A | N/A | 12392 | 12411 | CGAAAAACTACAACCCCCAT | 33 | 1375 |
| 1127826 | N/A | N/A | 12683 | 12702 | TGGTGACACACCTACCCTGA | 13 | 1376 |
| 1127858 | N/A | N/A | 13389 | 13408 | CGAATACCCAGGTGCCCCCT | 11 | 1377 |
| 1127890 | N/A | N/A | 13589 | 13608 | CACGGTAAAGCCCAAAGCCC | 18 | 1378 |
| 1127922 | N/A | N/A | 14229 | 14248 | ATAGGACAGTCCCCACCTGG | 14 | 1379 |
| 1127954 | N/A | N/A | 15654 | 15673 | CCGTCTACAGGATTTTCTAG | 96 | 83 |
| 1127955 | N/A | N/A | 15655 | 15674 | TCCGTCTACAGGATTTTCTA | 87 | 1380 |
| 1127987 | N/A | N/A | 15867 | 15886 | CTATGAGACATGTCACTCCA | 54 | 1381 |
| 1128019 | N/A | N/A | 16828 | 16847 | GGCAATGCTAAGCCCCATTT | 91 | 1382 |
| 1128051 | N/A | N/A | 17140 | 17159 | GGTTTCTAGGATAGCAAGGA | 94 | 1383 |
| 1128083 | N/A | N/A | 17842 | 17861 | ACCGTGTTGGCCGTGTCCCT | 52 | 1384 |
| 1128115 | N/A | N/A | 18203 | 18222 | TGTGGACCTCAGAATAGATC | 48 | 1385 |
| 1128147 | N/A | N/A | 19198 | 19217 | TGTGTCCGCCTCGCTCTGTT | 36 | 1386 |
| 1128179 | N/A | N/A | 19359 | 19378 | CGTCCCTAAAGTGGCCCGAT | 9 | 1387 |
| 1128211 | N/A | N/A | 19567 | 19586 | TTTTTTGGGCCCCTAGACTC | 20 | 1388 |
| 1128243 | N/A | N/A | 19789 | 19808 | GGGACTATTGGAAATTATAG | 34 | 1389 |
| 1128275 | N/A | N/A | 19917 | 19936 | AGCAACTGTTCCATCATAGC | 91 | 1390 |
| 1128307 | N/A | N/A | 21111 | 21130 | CCAGGAGTTGTGGATTCCCA | 46 | 1391 |
| 1128339 | N/A | N/A | 21623 | 21642 | ACTCAGCCCAAGTGCCTTAT | 23 | 1392 |
| 1128371 | N/A | N/A | 21824 | 21843 | TGCTAGCTCTGACTAGGATG | 13 | 1393 |
| 1128403 | N/A | N/A | 21928 | 21947 | GTATCACAAAAGCACGCGCT | 46 | 1394 |
| 1128435 | N/A | N/A | 22094 | 22113 | GTCTTACGAGGAGACTTGGC | 18 | 1395 |
| 1128467 | N/A | N/A | 24577 | 24596 | GACTTAGTCTATTTTGATGG | 17 | 1396 |
| 1128499 | N/A | N/A | 24660 | 24679 | ACCTGTAGGATCGGGCCAAG | 34 | 1397 |
| 1128531 | N/A | N/A | 24868 | 24887 | CGCCTGTACCAAGTGCCAGG | 0 | 1398 |
| 1128563 | N/A | N/A | 24942 | 24961 | GAGAGACCCACTTAGCTTCC | 30 | 1399 |
| 1128595 | N/A | N/A | 25473 | 25492 | GATTTGCCAGGAGAGGATAG | 11 | 1400 |
| 1128627 | N/A | N/A | 25576 | 25595 | CACCATCGCGATCGGCCTGG | 26 | 1401 |
| 1128659 | N/A | N/A | 25989 | 26008 | TCCACCCCTTATGTAGATAA | 23 | 1402 |
| 1128691 | N/A | N/A | 26363 | 26382 | CGGCGATGTGGGTGCAAACC | 0 | 1403 |

TABLE 20
Reduction of GYS1 RNA by 5-10-5 MOE gapmers in A431 cells

| | SEQ | SEQ | SEQ | SEQ | | | |
|---|---|---|---|---|---|---|---|
| | ID | ID | ID | ID | | | |
| | NO: 1 | NO: 1 | NO: 2 | NO: 2 | | | SEQ |
| Compound | Start | Stop | Start | Stop | | % | ID |
| Number | Site | Site | Site | Site | Sequence (5′ to 3′) | Reduction | No. |
| 1126259 | 54 | 73 | 2701 | 2720 | CCTAGGCAGAAGGAGGCCGC | 14 | 1404 |
| 1126291 | 168 | 187 | 2815 | 2834 | TCTAGGGAATGCACCAGGTA | 77 | 1405 |
| 1126323 | 245 | 264 | 2892 | 2911 | GACAAAGTGCGGTTTAAAGG | 65 | 1406 |
| 1126355 | 424 | 443 | 4582 | 4601 | ACGGCCCCACCAGGAAGTAG | 35 | 1407 |
| 1126387 | 772 | 791 | 10004 | 10023 | CCAACCACTCATGGAAGTGA | 24 | 1408 |
| 1126419 | 878 | 897 | 10110 | 10129 | TCCACGGCACCGGCACACAG | 1 | 1409 |
| 1126451 | 1012 | 1031 | 10488 | 10507 | TGGCGGTGATCTGGGACACA | 93 | 1410 |
| 1126483 | 1213 | 1232 | 13656 | 13675 | GGCCGGCGATAAAGAAGTAT | 0 | 1411 |
| 1126515 | 1332 | 1351 | 14393 | 14412 | CGCTGGCATGATGAAGAAGG | 35 | 1412 |
| 1126547 | 1474 | 1493 | 18002 | 18021 | TGTTCATGTCGGGAAGGCTC | 25 | 1413 |
| 1126579 | 1625 | 1644 | 21343 | 21362 | CTATTGAAGAGGCCGATTCG | 10 | 1414 |
| 1126611 | 1765 | 1784 | 21763 | 21782 | TGTAGCCCCAAGGCTCATAG | 7 | 1415 |
| 1126643 | 1923 | 1942 | 25328 | 25347 | GAGCTGCGAGCAGGAATCAT | 3 | 1416 |
| 1126675 | 2051 | 2070 | 26146 | 26165 | TGGCGCGCAGACATATAGTA | 17 | 1417 |
| 1126707 | 2233 | 2252 | 26491 | 26510 | CTTCCTCCAGCGGCCCGTTC | 30 | 1418 |
| 1126739 | 2311 | 2330 | 26569 | 26588 | CTCGGCGCGGCCACTCTGGT | 19 | 1419 |
| 1126771 | 2576 | 2595 | 26834 | 26853 | GAGTGTTTGGCGGACTGGGT | 60 | 1420 |
| 1126803 | 2810 | 2829 | 27068 | 27087 | AGAATTTGTAAGCCACACGG | 89 | 1421 |
| 1126835 | 2911 | 2930 | 27169 | 27188 | CGGCTCTGGACTTGATCGCC | 35 | 1422 |
| 1126867 | 3062 | 3081 | 27320 | 27339 | GGGATGACAGGAGCCGGATG | 61 | 1423 |
| 1126899 | 3362 | 3381 | 27620 | 27639 | GGGATCAGTATGCAGTAACG | 90 | 1424 |
| 1126931 | 3570 | 3589 | 27828 | 27847 | TCATCTCATCTCCGGACACA | 90 | 217 |
| 1126963 | N/A | N/A | 3079 | 3098 | CCTAGTAGCCCCGTCCTCCT | 22 | 1425 |
| 1126995 | N/A | N/A | 3272 | 3291 | GTATCTAGTCTCTCGGAAGC | 55 | 1426 |
| 1127027 | N/A | N/A | 3352 | 3371 | TAGGTCTGAAACCCCGGCAG | 55 | 1427 |
| 1127059 | N/A | N/A | 3431 | 3450 | GCCGCTCAGGCCTCCTATCT | 22 | 1428 |
| 1127091 | N/A | N/A | 3577 | 3596 | ACGCATGTGTCCCAGGCCAT | 80 | 373 |
| 1127123 | N/A | N/A | 3846 | 3865 | CGATACCCGGCTGGGTGTTC | 36 | 1429 |
| 1127155 | N/A | N/A | 4132 | 4151 | ACTCAGGTTCCCGAGTTCCC | 61 | 1430 |
| 1127187 | N/A | N/A | 4373 | 4392 | ACTGGGAGCCCATAGTTTGG | 36 | 1431 |
| 1127219 | N/A | N/A | 4826 | 4845 | GGGTGTCCTATCACGCCTCC | 28 | 1432 |
| 1127251 | N/A | N/A | 4982 | 5001 | GACCAGGCTGTCTTTCGATC | 89 | 453 |
| 1127283 | N/A | N/A | 5419 | 5438 | ACAATGACAATCACCGCCCA | 0 | 1433 |
| 1127315 | N/A | N/A | 5891 | 5910 | ACAGTCGGACCTGAATGGAT | 64 | 1434 |
| 1127347 | N/A | N/A | 6060 | 6079 | CGCCGACCTGGCTTTTTGCT | 22 | 1435 |
| 1127379 | N/A | N/A | 6266 | 6285 | CCCTCGGCCACGCCACACAT | 0 | 1436 |
| 1127411 | N/A | N/A | 7670 | 7689 | TGATGCTAATTCCTTCCACG | 87 | 1437 |
| 1127443 | N/A | N/A | 8509 | 8528 | AGATGTCTATAGACTTAAGC | 34 | 1438 |
| 1127475 | N/A | N/A | 8902 | 8921 | GATTAAAGGACCCTATGACT | 22 | 1439 |
| 1127507 | N/A | N/A | 8983 | 9002 | CTAGAGTAAATGAAGTTGGC | 86 | 1440 |
| 1127539 | N/A | N/A | 9541 | 9560 | GCAGCCAGTTCCTCAATTAT | 18 | 1441 |
| 1127571 | N/A | N/A | 9618 | 9637 | AAGACCCCTTGTCTCAAGGG | 6 | 1442 |
| 1127603 | N/A | N/A | 9709 | 9728 | GAGGATTTTTTGGCCAACCA | 95 | 1443 |
| 1127635 | N/A | N/A | 9858 | 9877 | GTCAATCTGTCACCACTACT | 55 | 1444 |
| 1127667 | N/A | N/A | 9925 | 9944 | CCACTGTCTCCACGAGTGTT | 0 | 1445 |
| 1127699 | N/A | N/A | 10365 | 10384 | GGGACAGCAGTCCGGTTAGA | 9 | 1446 |
| 1127731 | N/A | N/A | 12010 | 12029 | CCAGCTTAGGACTTAGGATG | 51 | 1447 |
| 1127763 | N/A | N/A | 12288 | 12307 | TGAGAACGGATACTAAGGGC | 74 | 1448 |
| 1127795 | N/A | N/A | 12401 | 12420 | GTATATCAACGAAAAACTAC | 0 | 1449 |
| 1127827 | N/A | N/A | 12684 | 12703 | TTGGTGACACACCTACCCTG | 38 | 1450 |
| 1127859 | N/A | N/A | 13391 | 13410 | GCCGAATACCCAGGTGCCCC | 4 | 1451 |
| 1127891 | N/A | N/A | 13590 | 13609 | GCACGGTAAAGCCCAAAGCC | 10 | 1452 |
| 1127923 | N/A | N/A | 14231 | 14250 | TTATAGGACAGTCCCCACCT | 29 | 1453 |
| 1127954 | N/A | N/A | 15654 | 15673 | CCGTCTACAGGATTTTCTAG | 96 | 83 |
| 1127956 | N/A | N/A | 15656 | 15675 | TTCCGTCTACAGGATTTTCT | 78 | 1454 |
| 1127988 | N/A | N/A | 15868 | 15887 | TCTATGAGACATGTCACTCC | 29 | 1455 |
| 1128020 | N/A | N/A | 16829 | 16848 | TGGCAATGCTAAGCCCCATT | 71 | 1456 |
| 1128052 | N/A | N/A | 17141 | 17160 | AGGTTTCTAGGATAGCAAGG | 82 | 1457 |
| 1128084 | N/A | N/A | 17886 | 17905 | ACACCAGTAAGGATTCATAA | 24 | 1458 |
| 1128116 | N/A | N/A | 18213 | 18232 | CGTGCCCTTCTGTGGACCTC | 24 | 1459 |
| 1128148 | N/A | N/A | 19200 | 19219 | TATGTGTCCGCCTCGCTCTG | 35 | 1460 |
| 1128180 | N/A | N/A | 19425 | 19444 | CGCAGCTGCTGAGAGTTTGC | 7 | 1461 |
| 1128212 | N/A | N/A | 19568 | 19587 | GTTTTTTGGGCCCCTAGACT | 24 | 1462 |
| 1128244 | N/A | N/A | 19797 | 19816 | CTGCTTTAGGGACTATTGGA | 45 | 1463 |
| 1128276 | N/A | N/A | 19918 | 19937 | TAGCAACTGTTCCATCATAG | 72 | 1464 |
| 1128308 | N/A | N/A | 21114 | 21133 | TCACCAGGAGTTGTGGATTC | 18 | 1465 |
| 1128340 | N/A | N/A | 21624 | 21643 | GACTCAGCCCAAGTGCCTTA | 11 | 1466 |
| 1128372 | N/A | N/A | 21825 | 21844 | ATGCTAGCTCTGACTAGGAT | 23 | 1467 |
| 1128404 | N/A | N/A | 21929 | 21948 | TGTATCACAAAAGCACGCGC | 9 | 1468 |
| 1128436 | N/A | N/A | 22095 | 22114 | CGTCTTACGAGGAGACTTGG | 19 | 1469 |
| 1128468 | N/A | N/A | 24578 | 24597 | GGACTTAGTCTATTTTGATG | 19 | 1470 |
| 1128500 | N/A | N/A | 24661 | 24680 | AACCTGTAGGATCGGGCCAA | 30 | 1471 |
| 1128532 | N/A | N/A | 24869 | 24888 | GCGCCTGTACCAAGTGCCAG | 4 | 1472 |
| 1128564 | N/A | N/A | 24944 | 24963 | GAGAGAGACCCACTTAGCTT | 15 | 1473 |
| 1128596 | N/A | N/A | 25502 | 25521 | GCACCAAAGACCCCTAGCCA | 18 | 1474 |
| 1128628 | N/A | N/A | 25577 | 25596 | CCACCATCGCGATCGGCCTG | 31 | 1475 |
| 1128660 | N/A | N/A | 25990 | 26009 | CTCCACCCCTTATGTAGATA | 33 | 1476 |
| 1128692 | N/A | N/A | 26364 | 26383 | ACGGCGATGTGGGTGCAAAC | 23 | 1477 |

TABLE 21
Reduction of GYS1 RNA by 5-10-5 MOE gapmers in A431 cells

| | SEQ | SEQ | SEQ | SEQ | | | |
|---|---|---|---|---|---|---|---|
| | ID | ID | ID | ID | | | |
| | NO: 1 | NO: 1 | NO: 2 | NO: 2 | | | SEQ |
| Compound | Start | Stop | Start | Stop | | % | ID |
| Number | Site | Site | Site | Site | Sequence (5′ to 3′) | Reduction | No. |
| 1126260 | 55 | 74 | 2702 | 2721 | ACCTAGGCAGAAGGAGGCCG | 0 | 1478 |
| 1126292 | 169 | 188 | 2816 | 2835 | GTCTAGGGAATGCACCAGGT | 89 | 408 |
| 1126324 | 246 | 265 | 2893 | 2912 | GGACAAAGTGCGGTTTAAAG | 65 | 1479 |
| 1126356 | 429 | 448 | 4587 | 4606 | CGTGTACGGCCCCACCAGGA | 61 | 1480 |
| 1126388 | 774 | 793 | 10006 | 10025 | TGCCAACCACTCATGGAAGT | 23 | 1481 |
| 1126420 | 880 | 899 | 10112 | 10131 | AGTCCACGGCACCGGCACAC | 14 | 1482 |
| 1126452 | 1013 | 1032 | 10489 | 10508 | ATGGCGGTGATCTGGGACAC | 87† | 1483 |
| 1126484 | 1214 | 1233 | 13657 | 13676 | CGGCCGGCGATAAAGAAGTA | 0 | 1484 |
| 1126516 | 1333 | 1352 | 14394 | 14413 | GCGCTGGCATGATGAAGAAG | 15 | 1485 |
| 1126548 | 1475 | 1494 | 18003 | 18022 | TTGTTCATGTCGGGAAGGCT | 22 | 1486 |
| 1126580 | 1626 | 1645 | 21344 | 21363 | GCTATTGAAGAGGCCGATTC | 17 | 1487 |
| 1126612 | 1766 | 1785 | 21764 | 21783 | GTGTAGCCCCAAGGCTCATA | 30 | 1488 |
| 1126644 | 1924 | 1943 | 25329 | 25348 | TGAGCTGCGAGCAGGAATCA | 18 | 1489 |
| 1126676 | 2053 | 2072 | 26148 | 26167 | TGTGGCGCGCAGACATATAG | 29 | 1490 |
| 1126708 | 2234 | 2253 | 26492 | 26511 | TCTTCCTCCAGCGGCCCGTT | 20 | 1491 |
| 1126740 | 2313 | 2332 | 26571 | 26590 | CGCTCGGCGCGGCCACTCTG | 31 | 1492 |
| 1126772 | 2578 | 2597 | 26836 | 26855 | TGGAGTGTTTGGCGGACTGG | 30 | 1493 |
| 1126804 | 2811 | 2830 | 27069 | 27088 | TAGAATTTGTAAGCCACACG | 79 | 1494 |
| 1126836 | 2912 | 2931 | 27170 | 27189 | CCGGCTCTGGACTTGATCGC | 26 | 1495 |
| 1126868 | 3080 | 3099 | 27338 | 27357 | TGCTTGGCCAAAGTGTAGGG | 60 | 1496 |
| 1126900 | 3363 | 3382 | 27621 | 27640 | AGGGATCAGTATGCAGTAAC | 90 | 1497 |
| 1126932 | 3571 | 3590 | 27829 | 27848 | TTCATCTCATCTCCGGACAC | 73 | 1498 |
| 1126964 | N/A | N/A | 3080 | 3099 | CCCTAGTAGCCCCGTCCTCC | 45 | 1499 |
| 1126996 | N/A | N/A | 3273 | 3292 | GGTATCTAGTCTCTCGGAAG | 84 | 1500 |
| 1127028 | N/A | N/A | 3353 | 3372 | ATAGGTCTGAAACCCCGGCA | 62 | 1501 |
| 1127060 | N/A | N/A | 3432 | 3451 | CGCCGCTCAGGCCTCCTATC | 5 | 1502 |
| 1127092 | N/A | N/A | 3578 | 3597 | TACGCATGTGTCCCAGGCCA | 63 | 1503 |
| 1127124 | N/A | N/A | 3847 | 3866 | GCGATACCCGGCTGGGTGTT | 37 | 1504 |
| 1127156 | N/A | N/A | 4134 | 4153 | GGACTCAGGTTCCCGAGTTC | 8 | 1505 |
| 1127188 | N/A | N/A | 4374 | 4393 | GACTGGGAGCCCATAGTTTG | 13 | 1506 |
| 1127220 | N/A | N/A | 4827 | 4846 | TGGGTGTCCTATCACGCCTC | 12 | 1507 |
| 1127252 | N/A | N/A | 4983 | 5002 | TGACCAGGCTGTCTTTCGAT | 86 | 1508 |
| 1127284 | N/A | N/A | 5420 | 5439 | AACAATGACAATCACCGCCC | 14 | 1509 |
| 1127316 | N/A | N/A | 5892 | 5911 | CACAGTCGGACCTGAATGGA | 59 | 1510 |
| 1127348 | N/A | N/A | 6061 | 6080 | TCGCCGACCTGGCTTTTTGC | 28 | 1511 |
| 1127380 | N/A | N/A | 6268 | 6287 | CGCCCTCGGCCACGCCACAC | 36 | 1512 |
| 1127412 | N/A | N/A | 7803 | 7822 | TGTCCTGTGTCTATGCCCCC | 75 | 1513 |
| 1127444 | N/A | N/A | 8514 | 8533 | CAGGCAGATGTCTATAGACT | 82 | 1514 |
| 1127476 | N/A | N/A | 8903 | 8922 | GGATTAAAGGACCCTATGAC | 30 | 1515 |
| 1127508 | N/A | N/A | 8996 | 9015 | TATGCTTGGAAGACTAGAGT | 45 | 1516 |
| 1127540 | N/A | N/A | 9547 | 9566 | ATAGGAGCAGCCAGTTCCTC | 17 | 1517 |
| 1127572 | N/A | N/A | 9638 | 9657 | GGTCCTGGACATAGTTTCCA | 22 | 1518 |
| 1127604 | N/A | N/A | 9711 | 9730 | CTGAGGATTTTTTGGCCAAC | 81 | 1519 |
| 1127636 | N/A | N/A | 9859 | 9878 | GGTCAATCTGTCACCACTAC | 43 | 1520 |
| 1127668 | N/A | N/A | 9926 | 9945 | GCCACTGTCTCCACGAGTGT | 6 | 1521 |
| 1127700 | N/A | N/A | 10567 | 10586 | AGCTGCCTACCTCATTCACG | 7 | 1522 |
| 1127732 | N/A | N/A | 12011 | 12030 | CCCAGCTTAGGACTTAGGAT | 56 | 1523 |
| 1127764 | N/A | N/A | 12289 | 12308 | CTGAGAACGGATACTAAGGG | 83 | 1524 |
| 1127796 | N/A | N/A | 12443 | 12462 | CTTACAGGGACCCAATCATT | 8 | 1525 |
| 1127828 | N/A | N/A | 12686 | 12705 | CCTTGGTGACACACCTACCC | 0 | 1526 |
| 1127860 | N/A | N/A | 13392 | 13411 | GGCCGAATACCCAGGTGCCC | 2 | 1527 |
| 1127892 | N/A | N/A | 13591 | 13610 | GGCACGGTAAAGCCCAAAGC | 0 | 1528 |
| 1127924 | N/A | N/A | 14232 | 14251 | ATTATAGGACAGTCCCCACC | 27 | 1529 |
| 1127954 | N/A | N/A | 15654 | 15673 | CCGTCTACAGGATTTTCTAG | 96 | 83 |
| 1127957 | N/A | N/A | 15659 | 15678 | AAATTCCGTCTACAGGATTT | 37 | 1530 |
| 1127989 | N/A | N/A | 15869 | 15888 | CTCTATGAGACATGTCACTC | 45 | 1531 |
| 1128021 | N/A | N/A | 16845 | 16864 | GTACTTGTCCTGCAGATGGC | 92 | 1532 |
| 1128053 | N/A | N/A | 17142 | 17161 | TAGGTTTCTAGGATAGCAAG | 59 | 1533 |
| 1128085 | N/A | N/A | 17887 | 17906 | CACACCAGTAAGGATTCATA | 0 | 1534 |
| 1128117 | N/A | N/A | 18231 | 18250 | AAGTTGCACGAGTCAGCACG | 17 | 1535 |
| 1128149 | N/A | N/A | 19201 | 19220 | GTATGTGTCCGCCTCGCTCT | 25 | 1536 |
| 1128181 | N/A | N/A | 19428 | 19447 | AACCGCAGCTGCTGAGAGTT | 14 | 1537 |
| 1128213 | N/A | N/A | 19570 | 19589 | TAGTTTTTTGGGCCCCTAGA | 69 | 1538 |
| 1128245 | N/A | N/A | 19798 | 19817 | GCTGCTTTAGGGACTATTGG | 14 | 1539 |
| 1128277 | N/A | N/A | 19931 | 19950 | GGTGTATAGTTCTTAGCAAC | 59 | 1540 |
| 1128309 | N/A | N/A | 21115 | 21134 | ATCACCAGGAGTTGTGGATT | 18 | 1541 |
| 1128341 | N/A | N/A | 21655 | 21674 | GGTGGAAAATCACCTGGTAG | 0 | 1542 |
| 1128373 | N/A | N/A | 21828 | 21847 | GACATGCTAGCTCTGACTAG | 32 | 1543 |
| 1128405 | N/A | N/A | 21930 | 21949 | TTGTATCACAAAAGCACGCG | 34 | 1544 |
| 1128437 | N/A | N/A | 22120 | 22139 | AGGTGGAGTTGATGGGCACT | 29 | 1545 |
| 1128469 | N/A | N/A | 24579 | 24598 | CGGACTTAGTCTATTTTGAT | 28 | 1546 |
| 1128501 | N/A | N/A | 24662 | 24681 | CAACCTGTAGGATCGGGCCA | 34 | 1547 |
| 1128533 | N/A | N/A | 24885 | 24904 | ACACCGCCCTCTACTGGCGC | 0 | 1548 |
| 1128565 | N/A | N/A | 24945 | 24964 | GGAGAGAGACCCACTTAGCT | 20 | 1549 |
| 1128597 | N/A | N/A | 25503 | 25522 | TGCACCAAAGACCCCTAGCC | 15 | 1550 |
| 1128629 | N/A | N/A | 25578 | 25597 | GCCACCATCGCGATCGGCCT | 0 | 1551 |
| 1128661 | N/A | N/A | 25991 | 26010 | ACTCCACCCCTTATGTAGAT | 27 | 1552 |
| 1128693 | N/A | N/A | 26365 | 26384 | TACGGCGATGTGGGTGCAAA | 0 | 1553 |

TABLE 22
Reduction of GYS1 RNA by 5-10-5 MOE gapmers in A431 cells

| | SEQ | SEQ | SEQ | SEQ | | | |
|---|---|---|---|---|---|---|---|
| | ID | ID | ID | ID | | | |
| | NO: 1 | NO: 1 | NO: 2 | NO: 2 | | | SEQ |
| Compound | Start | Stop | Start | Stop | | % | ID |
| Number | Site | Site | Site | Site | Sequence (5′ to 3′) | Reduction | No. |
| 1126261 | 82 | 101 | 2729 | 2748 | ACCGCACCCCTGCCCCGAAG | 51 | 1554 |
| 1126293 | 170 | 189 | 2817 | 2836 | TGTCTAGGGAATGCACCAGG | 81 | 1555 |
| 1126325 | 247 | 266 | 2894 | 2913 | TGGACAAAGTGCGGTTTAAA | 69 | 1556 |
| 1126357 | 431 | 450 | 4589 | 4608 | TCCGTGTACGGCCCCACCAG | 32 | 1557 |
| 1126389 | 777 | 796 | 10009 | 10028 | GCCTGCCAACCACTCATGGA | 7 | 1558 |
| 1126421 | 881 | 900 | 10113 | 10132 | AAGTCCACGGCACCGGCACA | 18 | 1559 |
| 1126453 | 1016 | 1035 | 10492 | 10511 | TCGATGGCGGTGATCTGGGA | 71† | 1560 |
| 1126485 | 1217 | 1236 | 13660 | 13679 | TAGCGGCCGGCGATAAAGAA | 1 | 1561 |
| 1126517 | 1334 | 1353 | 14395 | 14414 | CGCGCTGGCATGATGAAGAA | 29 | 1562 |
| 1126549 | 1477 | 1496 | 18005 | 18024 | TCTTGTTCATGTCGGGAAGG | 20 | 1563 |
| 1126581 | 1627 | 1646 | 21345 | 21364 | TGCTATTGAAGAGGCCGATT | 30 | 1564 |
| 1126613 | 1767 | 1786 | 21765 | 21784 | TGTGTAGCCCCAAGGCTCAT | 16 | 1565 |
| 1126645 | 1959 | 1978 | 25364 | 25383 | CCGGCTCTGCTGACAGAAAC | 16 | 1566 |
| 1126677 | 2054 | 2073 | 26149 | 26168 | ATGTGGCGCGCAGACATATA | 0 | 1567 |
| 1126709 | 2235 | 2254 | 26493 | 26512 | GTCTTCCTCCAGCGGCCCGT | 9 | 1568 |
| 1126741 | 2314 | 2333 | 26572 | 26591 | ACGCTCGGCGCGGCCACTCT | 28 | 1569 |
| 1126773 | 2579 | 2598 | 26837 | 26856 | GTGGAGTGTTTGGCGGACTG | 63 | 1570 |
| 1126805 | 2827 | 2846 | 27085 | 27104 | CCTGCTCTGTATGCTGTAGA | 76 | 1571 |
| 1126837 | 2913 | 2932 | 27171 | 27190 | CCCGGCTCTGGACTTGATCG | 29 | 1572 |
| 1126869 | 3103 | 3122 | 27361 | 27380 | AGCCAAGTGGTTCTACCACC | 29 | 1573 |
| 1126901 | 3364 | 3383 | 27622 | 27641 | AAGGGATCAGTATGCAGTAA | 86 | 1574 |
| 1126933 | 3572 | 3591 | 27830 | 27849 | TTTCATCTCATCTCCGGACA | 75 | 1575 |
| 1126965 | N/A | N/A | 3081 | 3100 | CCCCTAGTAGCCCCGTCCTC | 15 | 1576 |
| 1126997 | N/A | N/A | 3274 | 3293 | AGGTATCTAGTCTCTCGGAA | 78 | 1577 |
| 1127029 | N/A | N/A | 3354 | 3373 | CATAGGTCTGAAACCCCGGC | 55 | 1578 |
| 1127061 | N/A | N/A | 3433 | 3452 | CCGCCGCTCAGGCCTCCTAT | 0 | 1579 |
| 1127093 | N/A | N/A | 3582 | 3601 | CCAGTACGCATGTGTCCCAG | 90 | 1580 |
| 1127125 | N/A | N/A | 3848 | 3867 | GGCGATACCCGGCTGGGTGT | 9 | 1581 |
| 1127157 | N/A | N/A | 4139 | 4158 | TACCCGGACTCAGGTTCCCG | 35 | 1582 |
| 1127189 | N/A | N/A | 4375 | 4394 | GGACTGGGAGCCCATAGTTT | 4 | 1583 |
| 1127221 | N/A | N/A | 4828 | 4847 | CTGGGTGTCCTATCACGCCT | 32 | 1584 |
| 1127253 | N/A | N/A | 4984 | 5003 | TTGACCAGGCTGTCTTTCGA | 77 | 1585 |
| 1127285 | N/A | N/A | 5421 | 5440 | TAACAATGACAATCACCGCC | 0 | 1586 |
| 1127317 | N/A | N/A | 5893 | 5912 | ACACAGTCGGACCTGAATGG | 51 | 1587 |
| 1127349 | N/A | N/A | 6062 | 6081 | CTCGCCGACCTGGCTTTTTG | 27 | 1588 |
| 1127381 | N/A | N/A | 6269 | 6288 | CCGCCCTCGGCCACGCCACA | 33 | 1589 |
| 1127413 | N/A | N/A | 7804 | 7823 | ATGTCCTGTGTCTATGCCCC | 84 | 1590 |
| 1127445 | N/A | N/A | 8515 | 8534 | GCAGGCAGATGTCTATAGAC | 77 | 1591 |
| 1127477 | N/A | N/A | 8905 | 8924 | TTGGATTAAAGGACCCTATG | 4 | 1592 |
| 1127509 | N/A | N/A | 8997 | 9016 | CTATGCTTGGAAGACTAGAG | 38 | 1593 |
| 1127541 | N/A | N/A | 9548 | 9567 | CATAGGAGCAGCCAGTTCCT | 21 | 1594 |
| 1127573 | N/A | N/A | 9669 | 9688 | GATTGGACAGACTGAAGTTT | 36 | 1595 |
| 1127605 | N/A | N/A | 9793 | 9812 | GGACCTGTAAATCCCTGAGG | 0 | 1596 |
| 1127637 | N/A | N/A | 9860 | 9879 | AGGTCAATCTGTCACCACTA | 27 | 1597 |
| 1127669 | N/A | N/A | 10133 | 10152 | CGTTCTCCAGGTTGTTGTAG | 78 | 1598 |
| 1127701 | N/A | N/A | 10574 | 10593 | CATAGACAGCTGCCTACCTC | 26 | 1599 |
| 1127733 | N/A | N/A | 12012 | 12031 | CCCCAGCTTAGGACTTAGGA | 31 | 1600 |
| 1127765 | N/A | N/A | 12290 | 12309 | ACTGAGAACGGATACTAAGG | 56 | 1601 |
| 1127797 | N/A | N/A | 12444 | 12463 | TCTTACAGGGACCCAATCAT | 9 | 1602 |
| 1127829 | N/A | N/A | 12687 | 12706 | CCCTTGGTGACACACCTACC | 25 | 1603 |
| 1127861 | N/A | N/A | 13393 | 13412 | AGGCCGAATACCCAGGTGCC | 8 | 1604 |
| 1127893 | N/A | N/A | 13592 | 13611 | AGGCACGGTAAAGCCCAAAG | 9 | 1605 |
| 1127925 | N/A | N/A | 14236 | 14255 | GAGAATTATAGGACAGTCCC | 27 | 1606 |
| 1127954 | N/A | N/A | 15654 | 15673 | CCGTCTACAGGATTTTCTAG | 96 | 83 |
| 1127958 | N/A | N/A | 15660 | 15679 | TAAATTCCGTCTACAGGATT | 30 | 1607 |
| 1127990 | N/A | N/A | 15878 | 15897 | CTACCCCTTCTCTATGAGAC | 57 | 1608 |
| 1128022 | N/A | N/A | 16849 | 16868 | ACTTGTACTTGTCCTGCAGA | 32 | 1609 |
| 1128054 | N/A | N/A | 17145 | 17164 | CCTTAGGTTTCTAGGATAGC | 66 | 1610 |
| 1128086 | N/A | N/A | 17890 | 17909 | ACTCACACCAGTAAGGATTC | 0 | 1611 |
| 1128118 | N/A | N/A | 18232 | 18251 | GAAGTTGCACGAGTCAGCAC | 28 | 1612 |
| 1128150 | N/A | N/A | 19202 | 19221 | TGTATGTGTCCGCCTCGCTC | 22 | 1613 |
| 1128182 | N/A | N/A | 19429 | 19448 | AAACCGCAGCTGCTGAGAGT | 21 | 1614 |
| 1128214 | N/A | N/A | 19572 | 19591 | TGTAGTTTTTTGGGCCCCTA | 15 | 1615 |
| 1128246 | N/A | N/A | 19799 | 19818 | GGCTGCTTTAGGGACTATTG | 35 | 1616 |
| 1128278 | N/A | N/A | 19960 | 19979 | GTGTGATAGGAAGTCCTGAG | 78 | 1617 |
| 1128310 | N/A | N/A | 21116 | 21135 | GATCACCAGGAGTTGTGGAT | 39 | 1618 |
| 1128342 | N/A | N/A | 21771 | 21790 | ACCCGGTGTGTAGCCCCAAG | 0 | 1619 |
| 1128374 | N/A | N/A | 21829 | 21848 | AGACATGCTAGCTCTGACTA | 66 | 1620 |
| 1128406 | N/A | N/A | 21941 | 21960 | TACATGAGCTATTGTATCAC | 38 | 1621 |
| 1128438 | N/A | N/A | 22147 | 22166 | ACTGGCTAATGTGAACCAAC | 31 | 1622 |
| 1128470 | N/A | N/A | 24583 | 24602 | TGTACGGACTTAGTCTATTT | 38 | 1623 |
| 1128502 | N/A | N/A | 24663 | 24682 | ACAACCTGTAGGATCGGGCC | 24 | 1624 |
| 1128534 | N/A | N/A | 24886 | 24905 | AACACCGCCCTCTACTGGCG | 11 | 1625 |
| 1128566 | N/A | N/A | 24966 | 24985 | GCACTCAGCTGCGGGAAGGC | 7 | 1626 |
| 1128598 | N/A | N/A | 25504 | 25523 | CTGCACCAAAGACCCCTAGC | 0 | 1627 |
| 1128630 | N/A | N/A | 25580 | 25599 | GAGCCACCATCGCGATCGGC | 25 | 1628 |
| 1128662 | N/A | N/A | 25993 | 26012 | TGACTCCACCCCTTATGTAG | 18 | 1629 |
| 1128694 | N/A | N/A | 26366 | 26385 | ATACGGCGATGTGGGTGCAA | 0 | 1630 |

TABLE 23
Reduction of GYS1 RNA by 5-10-5 MOE gapmers in A431 cells

| | SEQ | SEQ | SEQ | SEQ | | | |
|---|---|---|---|---|---|---|---|
| | ID | ID | ID | ID | | | |
| | NO: 1 | NO: 1 | NO: 2 | NO: 2 | | | SEQ |
| Compound | Start | Stop | Start | Stop | | % | ID |
| Number | Site | Site | Site | Site | Sequence (5′ to 3′) | Reduction | No. |
| 1126262 | 91 | 110 | 2738 | 2757 | TATTGCAAGACCGCACCCCT | 1 | 1631 |
| 1126294 | 171 | 190 | 2818 | 2837 | GTGTCTAGGGAATGCACCAG | 74 | 1632 |
| 1126326 | 248 | 267 | 2895 | 2914 | ATGGACAAAGTGCGGTTTAA | 67 | 1633 |
| 1126358 | 434 | 453 | 4592 | 4611 | TGCTCCGTGTACGGCCCCAC | 26 | 1634 |
| 1126390 | 779 | 798 | 10011 | 10030 | ACGCCTGCCAACCACTCATG | 15 | 1635 |
| 1126422 | 882 | 901 | 10114 | 10133 | GAAGTCCACGGCACCGGCAC | 0 | 1636 |
| 1126454 | 1017 | 1036 | 10493 | 10512 | CTCGATGGCGGTGATCTGGG | 79† | 1637 |
| 1126486 | 1218 | 1237 | 13661 | 13680 | ATAGCGGCCGGCGATAAAGA | 14 | 1638 |
| 1126518 | 1335 | 1354 | 14396 | 14415 | CCGCGCTGGCATGATGAAGA | 15 | 1639 |
| 1126550 | 1478 | 1497 | 18006 | 18025 | ATCTTGTTCATGTCGGGAAG | 68 | 1640 |
| 1126582 | 1628 | 1647 | 21346 | 21365 | CTGCTATTGAAGAGGCCGAT | 10 | 1641 |
| 1126614 | 1769 | 1788 | 21767 | 21786 | GGTGTGTAGCCCCAAGGCTC | 18 | 1642 |
| 1126646 | 1960 | 1979 | 25365 | 25384 | GCCGGCTCTGCTGACAGAAA | 19 | 1643 |
| 1126678 | 2055 | 2074 | 26150 | 26169 | CATGTGGCGCGCAGACATAT | 16 | 1644 |
| 1126710 | 2240 | 2259 | 26498 | 26517 | TCGCCGTCTTCCTCCAGCGG | 17 | 1645 |
| 1126742 | 2345 | 2364 | 26603 | 26622 | CGCTTGCTGCCGCTGGTGGA | 25 | 1646 |
| 1126774 | 2580 | 2599 | 26838 | 26857 | GGTGGAGTGTTTGGCGGACT | 60 | 1647 |
| 1126806 | 2829 | 2848 | 27087 | 27106 | GGCCTGCTCTGTATGCTGTA | 42 | 1648 |
| 1126838 | 2915 | 2934 | 27173 | 27192 | GCCCCGGCTCTGGACTTGAT | 23 | 1649 |
| 1126870 | 3104 | 3123 | 27362 | 27381 | CAGCCAAGTGGTTCTACCAC | 9 | 1650 |
| 1126902 | 3366 | 3385 | 27624 | 27643 | GAAAGGGATCAGTATGCAGT | 87 | 1651 |
| 1126934 | N/A | N/A | 2990 | 3009 | CACCCTTGTTAGCCACCTCC | 10 | 1652 |
| 1126966 | N/A | N/A | 3082 | 3101 | TCCCCTAGTAGCCCCGTCCT | 36 | 1653 |
| 1126998 | N/A | N/A | 3275 | 3294 | CAGGTATCTAGTCTCTCGGA | 84 | 1654 |
| 1127030 | N/A | N/A | 3355 | 3374 | TCATAGGTCTGAAACCCCGG | 39 | 1655 |
| 1127062 | N/A | N/A | 3438 | 3457 | TCCCACCGCCGCTCAGGCCT | 10 | 1656 |
| 1127094 | N/A | N/A | 3583 | 3602 | TCCAGTACGCATGTGTCCCA | 83 | 1657 |
| 1127126 | N/A | N/A | 3849 | 3868 | TGGCGATACCCGGCTGGGTG | 18 | 1658 |
| 1127158 | N/A | N/A | 4140 | 4159 | CTACCCGGACTCAGGTTCCC | 48 | 1659 |
| 1127190 | N/A | N/A | 4465 | 4484 | CCGAGGTCCATAGTTCTGGG | 45 | 1660 |
| 1127222 | N/A | N/A | 4829 | 4848 | TCTGGGTGTCCTATCACGCC | 55 | 1661 |
| 1127254 | N/A | N/A | 5303 | 5322 | GCATGTCCATTAGCCAAGGA | 53 | 1662 |
| 1127286 | N/A | N/A | 5455 | 5474 | GCTTGGCTGTTAGTAACAAT | 82 | 1663 |
| 1127318 | N/A | N/A | 5894 | 5913 | GACACAGTCGGACCTGAATG | 65 | 1664 |
| 1127350 | N/A | N/A | 6063 | 6082 | CCTCGCCGACCTGGCTTTTT | 0 | 1665 |
| 1127382 | N/A | N/A | 6984 | 7003 | CTATCCATAGGCCCATTTTG | 57 | 1666 |
| 1127414 | N/A | N/A | 7809 | 7828 | GTCACATGTCCTGTGTCTAT | 94 | 1667 |
| 1127446 | N/A | N/A | 8531 | 8550 | CGTGGTTCTCCCATTTGCAG | 49 | 1668 |
| 1127478 | N/A | N/A | 8906 | 8925 | CTTGGATTAAAGGACCCTAT | 35 | 1669 |
| 1127510 | N/A | N/A | 8998 | 9017 | CCTATGCTTGGAAGACTAGA | 10 | 1670 |
| 1127542 | N/A | N/A | 9549 | 9568 | CCATAGGAGCAGCCAGTTCC | 5 | 1671 |
| 1127574 | N/A | N/A | 9671 | 9690 | TAGATTGGACAGACTGAAGT | 12 | 1672 |
| 1127606 | N/A | N/A | 9794 | 9813 | GGGACCTGTAAATCCCTGAG | 30 | 1673 |
| 1127638 | N/A | N/A | 9862 | 9881 | AGAGGTCAATCTGTCACCAC | 35 | 1674 |
| 1127670 | N/A | N/A | 10154 | 10173 | ATCTGCCACGGTCCCAGCTC | 20 | 1675 |
| 1127702 | N/A | N/A | 10575 | 10594 | GCATAGACAGCTGCCTACCT | 49 | 1676 |
| 1127734 | N/A | N/A | 12013 | 12032 | TCCCCAGCTTAGGACTTAGG | 39 | 1677 |
| 1127766 | N/A | N/A | 12291 | 12310 | CACTGAGAACGGATACTAAG | 45 | 1678 |
| 1127798 | N/A | N/A | 12446 | 12465 | CTTCTTACAGGGACCCAATC | 22 | 1679 |
| 1127830 | N/A | N/A | 12688 | 12707 | TCCCTTGGTGACACACCTAC | 10 | 1680 |
| 1127862 | N/A | N/A | 13394 | 13413 | GAGGCCGAATACCCAGGTGC | 22 | 1681 |
| 1127894 | N/A | N/A | 13593 | 13612 | AAGGCACGGTAAAGCCCAAA | 13 | 1682 |
| 1127926 | N/A | N/A | 14245 | 14264 | CCTGTCAAGGAGAATTATAG | 28 | 1683 |
| 1127954 | N/A | N/A | 15654 | 15673 | CCGTCTACAGGATTTTCTAG | 94 | 83 |
| 1127959 | N/A | N/A | 15661 | 15680 | GTAAATTCCGTCTACAGGAT | 74 | 1684 |
| 1127991 | N/A | N/A | 16565 | 16584 | TCGGCCACTTTCTAGGTTCA | 71 | 1685 |
| 1128023 | N/A | N/A | 16850 | 16869 | GACTTGTACTTGTCCTGCAG | 22 | 1686 |
| 1128055 | N/A | N/A | 17146 | 17165 | CCCTTAGGTTTCTAGGATAG | 44 | 1687 |
| 1128087 | N/A | N/A | 17892 | 17911 | GCACTCACACCAGTAAGGAT | 0 | 1688 |
| 1128119 | N/A | N/A | 18233 | 18252 | TGAAGTTGCACGAGTCAGCA | 22 | 1689 |
| 1128151 | N/A | N/A | 19203 | 19222 | GTGTATGTGTCCGCCTCGCT | 41 | 1690 |
| 1128183 | N/A | N/A | 19494 | 19513 | GGGATCTAAAGCAGCTACAA | 5 | 1691 |
| 1128215 | N/A | N/A | 19575 | 19594 | AGTTGTAGTTTTTTGGGCCC | 0 | 1692 |
| 1128247 | N/A | N/A | 19808 | 19827 | AATGAGGTGGGCTGCTTTAG | 28 | 1693 |
| 1128279 | N/A | N/A | 19961 | 19980 | AGTGTGATAGGAAGTCCTGA | 67 | 1694 |
| 1128311 | N/A | N/A | 21120 | 21139 | AAGTGATCACCAGGAGTTGT | 16 | 1695 |
| 1128343 | N/A | N/A | 21772 | 21791 | CACCCGGTGTGTAGCCCCAA | 0 | 1696 |
| 1128375 | N/A | N/A | 21831 | 21850 | CAAGACATGCTAGCTCTGAC | 28 | 1697 |
| 1128407 | N/A | N/A | 21980 | 21999 | GTTCACTAGTCCTCAAAACC | 24 | 1698 |
| 1128439 | N/A | N/A | 22148 | 22167 | CACTGGCTAATGTGAACCAA | 28 | 1699 |
| 1128471 | N/A | N/A | 24584 | 24603 | TTGTACGGACTTAGTCTATT | 20 | 1700 |
| 1128503 | N/A | N/A | 24664 | 24683 | CACAACCTGTAGGATCGGGC | 58 | 1701 |
| 1128535 | N/A | N/A | 24893 | 24912 | ACGCCTCAACACCGCCCTCT | 13 | 1702 |
| 1128567 | N/A | N/A | 24967 | 24986 | TGCACTCAGCTGCGGGAAGG | 0 | 1703 |
| 1128599 | N/A | N/A | 25505 | 25524 | CCTGCACCAAAGACCCCTAG | 24 | 1704 |
| 1128631 | N/A | N/A | 25581 | 25600 | TGAGCCACCATCGCGATCGG | 5 | 1705 |
| 1128663 | N/A | N/A | 25994 | 26013 | CTGACTCCACCCCTTATGTA | 23 | 1706 |
| 1128695 | N/A | N/A | 26367 | 26386 | CATACGGCGATGTGGGTGCA | 0 | 1707 |

TABLE 24
Reduction of GYS1 RNA by 5-10-5 MOE gapmers in A431 cells

| | SEQ | SEQ | SEQ | SEQ | | | |
|---|---|---|---|---|---|---|---|
| | ID | ID | ID | ID | | | |
| | NO: 1 | NO: 1 | NO: 2 | NO: 2 | | | SEQ |
| Compound | Start | Stop | Start | Stop | | % | ID |
| Number | Site | Site | Site | Site | Sequence (5′ to 3′) | Reduction | No. |
| 1126263 | 92 | 111 | 2739 | 2758 | CTATTGCAAGACCGCACCCC | 2 | 1708 |
| 1126295 | 172 | 191 | 2819 | 2838 | GGTGTCTAGGGAATGCACCA | 0 | 1709 |
| 1126327 | 249 | 268 | 2896 | 2915 | CATGGACAAAGTGCGGTTTA | 46 | 1710 |
| 1126359 | 435 | 454 | 4593 | 4612 | CTGCTCCGTGTACGGCCCCA | 9 | 1711 |
| 1126391 | 801 | 820 | 10033 | 10052 | GGCACGACACAGGCAGAGTC | 15 | 1712 |
| 1126423 | 883 | 902 | 10115 | 10134 | AGAAGTCCACGGCACCGGCA | 26 | 1713 |
| 1126455 | 1019 | 1038 | 10495 | 10514 | GCCTCGATGGCGGTGATCTG | 82† | 1714 |
| 1126487 | 1221 | 1240 | 13664 | 13683 | CTCATAGCGGCCGGCGATAA | 18 | 1715 |
| 1126519 | 1337 | 1356 | 14398 | 14417 | GTCCGCGCTGGCATGATGAA | 1 | 1716 |
| 1126551 | 1479 | 1498 | 18007 | 18026 | CATCTTGTTCATGTCGGGAA | 30 | 1717 |
| 1126583 | 1629 | 1648 | 21347 | 21366 | ACTGCTATTGAAGAGGCCGA | 0 | 1718 |
| 1126615 | 1770 | 1789 | 21768 | 21787 | CGGTGTGTAGCCCCAAGGCT | 4 | 1719 |
| 1126647 | 1962 | 1981 | 25367 | 25386 | CCGCCGGCTCTGCTGACAGA | 0 | 1720 |
| 1126679 | 2056 | 2075 | 26151 | 26170 | CCATGTGGCGCGCAGACATA | 2 | 1721 |
| 1126711 | 2275 | 2294 | 26533 | 26552 | GGTCCTTGGCGGCCTCCTCG | 0 | 1722 |
| 1126743 | 2348 | 2367 | 26606 | 26625 | TTGCGCTTGCTGCCGCTGGT | 8 | 1723 |
| 1126775 | 2633 | 2652 | 26891 | 26910 | GCACGGCTTTGTGGATTCTG | 91 | 1724 |
| 1126807 | 2851 | 2870 | 27109 | 27128 | CCCGCATGCCGGGCCTGAGC | 16 | 1725 |
| 1126839 | 2916 | 2935 | 27174 | 27193 | TGCCCCGGCTCTGGACTTGA | 22 | 1726 |
| 1126871 | 3106 | 3125 | 27364 | 27383 | AGCAGCCAAGTGGTTCTACC | 50 | 1727 |
| 1126903 | 3402 | 3421 | 27660 | 27679 | GTTCTAGAACCCAGTGACCT | 11 | 1728 |
| 1126935 | N/A | N/A | 2991 | 3010 | TCACCCTTGTTAGCCACCTC | 40 | 1729 |
| 1126967 | N/A | N/A | 3085 | 3104 | GGTTCCCCTAGTAGCCCCGT | 35 | 1730 |
| 1126999 | N/A | N/A | 3276 | 3295 | CCAGGTATCTAGTCTCTCGG | 84 | 1731 |
| 1127031 | N/A | N/A | 3356 | 3375 | GTCATAGGTCTGAAACCCCG | 41 | 1732 |
| 1127063 | N/A | N/A | 3443 | 3462 | GGTCCTCCCACCGCCGCTCA | 28 | 1733 |
| 1127095 | N/A | N/A | 3584 | 3603 | TTCCAGTACGCATGTGTCCC | 76 | 1734 |
| 1127127 | N/A | N/A | 3850 | 3869 | CTGGCGATACCCGGCTGGGT | 8 | 1735 |
| 1127159 | N/A | N/A | 4141 | 4160 | ACTACCCGGACTCAGGTTCC | 13 | 1736 |
| 1127191 | N/A | N/A | 4467 | 4486 | GGCCGAGGTCCATAGTTCTG | 0 | 1737 |
| 1127223 | N/A | N/A | 4830 | 4849 | GTCTGGGTGTCCTATCACGC | 62 | 1738 |
| 1127255 | N/A | N/A | 5304 | 5323 | AGCATGTCCATTAGCCAAGG | 72 | 1739 |
| 1127287 | N/A | N/A | 5457 | 5476 | AAGCTTGGCTGTTAGTAACA | 68 | 1740 |
| 1127319 | N/A | N/A | 5895 | 5914 | GGACACAGTCGGACCTGAAT | 35 | 1741 |
| 1127351 | N/A | N/A | 6064 | 6083 | TCCTCGCCGACCTGGCTTTT | 12 | 1742 |
| 1127383 | N/A | N/A | 6986 | 7005 | CTCTATCCATAGGCCCATTT | 68 | 1743 |
| 1127415 | N/A | N/A | 7825 | 7844 | GCTTATAACCACATATGTCA | 74 | 1744 |
| 1127447 | N/A | N/A | 8532 | 8551 | CCGTGGTTCTCCCATTTGCA | 69 | 1745 |
| 1127479 | N/A | N/A | 8909 | 8928 | ATCCTTGGATTAAAGGACCC | 0 | 1746 |
| 1127511 | N/A | N/A | 8999 | 9018 | CCCTATGCTTGGAAGACTAG | 0 | 1747 |
| 1127543 | N/A | N/A | 9551 | 9570 | TGCCATAGGAGCAGCCAGTT | 17 | 1748 |
| 1127575 | N/A | N/A | 9672 | 9691 | TTAGATTGGACAGACTGAAG | 37 | 1749 |
| 1127607 | N/A | N/A | 9800 | 9819 | CGGACAGGGACCTGTAAATC | 47 | 1750 |
| 1127639 | N/A | N/A | 9864 | 9883 | GGAGAGGTCAATCTGTCACC | 47 | 1751 |
| 1127671 | N/A | N/A | 10160 | 10179 | TCCCCCATCTGCCACGGTCC | 0 | 1752 |
| 1127703 | N/A | N/A | 10577 | 10596 | TGGCATAGACAGCTGCCTAC | 8 | 1753 |
| 1127735 | N/A | N/A | 12015 | 12034 | GGTCCCCAGCTTAGGACTTA | 2 | 1754 |
| 1127767 | N/A | N/A | 12292 | 12311 | TCACTGAGAACGGATACTAA | 36 | 1755 |
| 1127799 | N/A | N/A | 12447 | 12466 | GCTTCTTACAGGGACCCAAT | 62 | 1756 |
| 1127831 | N/A | N/A | 12695 | 12714 | GGCCAGTTCCCTTGGTGACA | 13 | 1757 |
| 1127863 | N/A | N/A | 13395 | 13414 | GGAGGCCGAATACCCAGGTG | 13 | 1758 |
| 1127895 | N/A | N/A | 13594 | 13613 | CAAGGCACGGTAAAGCCCAA | 5 | 1759 |
| 1127927 | N/A | N/A | 14253 | 14272 | TACCCATTCCTGTCAAGGAG | 21 | 1760 |
| 1127954 | N/A | N/A | 15654 | 15673 | CCGTCTACAGGATTTTCTAG | 95 | 83 |
| 1127960 | N/A | N/A | 15662 | 15681 | AGTAAATTCCGTCTACAGGA | 87 | 1761 |
| 1127992 | N/A | N/A | 16566 | 16585 | CTCGGCCACTTTCTAGGTTC | 49 | 1762 |
| 1128024 | N/A | N/A | 16853 | 16872 | TAGGACTTGTACTTGTCCTG | 0 | 1763 |
| 1128056 | N/A | N/A | 17147 | 17166 | ACCCTTAGGTTTCTAGGATA | 36 | 1764 |
| 1128088 | N/A | N/A | 17893 | 17912 | GGCACTCACACCAGTAAGGA | 14 | 1765 |
| 1128120 | N/A | N/A | 18234 | 18253 | CTGAAGTTGCACGAGTCAGC | 19 | 1766 |
| 1128152 | N/A | N/A | 19298 | 19317 | CGTGTGCAGCAAGGCCCAAG | 18 | 1767 |
| 1128184 | N/A | N/A | 19495 | 19514 | AGGGATCTAAAGCAGCTACA | 45 | 1768 |
| 1128216 | N/A | N/A | 19576 | 19595 | GAGTTGTAGTTTTTTGGGCC | 1 | 1769 |
| 1128248 | N/A | N/A | 19809 | 19828 | TAATGAGGTGGGCTGCTTTA | 11 | 1770 |
| 1128280 | N/A | N/A | 19962 | 19981 | TAGTGTGATAGGAAGTCCTG | 18 | 1771 |
| 1128312 | N/A | N/A | 21122 | 21141 | CCAAGTGATCACCAGGAGTT | 22 | 1772 |
| 1128344 | N/A | N/A | 21775 | 21794 | ACTCACCCGGTGTGTAGCCC | 0 | 1773 |
| 1128376 | N/A | N/A | 21834 | 21853 | CCCCAAGACATGCTAGCTCT | 0 | 1774 |
| 1128408 | N/A | N/A | 21985 | 22004 | ATCCAGTTCACTAGTCCTCA | 22 | 1775 |
| 1128440 | N/A | N/A | 22150 | 22169 | AACACTGGCTAATGTGAACC | 4 | 1776 |
| 1128472 | N/A | N/A | 24585 | 24604 | CTTGTACGGACTTAGTCTAT | 15 | 1777 |
| 1128504 | N/A | N/A | 24665 | 24684 | TCACAACCTGTAGGATCGGG | 58 | 1778 |
| 1128536 | N/A | N/A | 24909 | 24928 | GTCTTAATCGCAATAGACGC | 0 | 1779 |
| 1128568 | N/A | N/A | 24968 | 24987 | GTGCACTCAGCTGCGGGAAG | 19 | 1780 |
| 1128600 | N/A | N/A | 25524 | 25543 | GTAGGATGAGACCCTGCACC | 0 | 1781 |
| 1128632 | N/A | N/A | 25582 | 25601 | ATGAGCCACCATCGCGATCG | 31 | 1782 |
| 1128664 | N/A | N/A | 25996 | 26015 | ATCTGACTCCACCCCTTATG | 13 | 1783 |
| 1128696 | N/A | N/A | 26368 | 26387 | GCATACGGCGATGTGGGTGC | 19 | 1784 |

TABLE 25
Reduction of GYS1 RNA by 5-10-5 MOE gapmers in A431 cells

| | SEQ | SEQ | SEQ | SEQ | | | |
|---|---|---|---|---|---|---|---|
| | ID | ID | ID | ID | | | |
| | NO: 1 | NO: 1 | NO: 2 | NO: 2 | | | SEQ |
| Compound | Start | Stop | Start | Stop | | % | ID |
| Number | Site | Site | Site | Site | Sequence (5′ to 3′) | Reduction | No. |
| 1126264 | 93 | 112 | 2740 | 2759 | CCTATTGCAAGACCGCACCC | 6 | 1785 |
| 1126296 | 173 | 192 | 2820 | 2839 | AGGTGTCTAGGGAATGCACC | 0 | 1786 |
| 1126328 | 250 | 269 | 2897 | 2916 | ACATGGACAAAGTGCGGTTT | 65 | 1787 |
| 1126360 | 438 | 457 | 4596 | 4615 | GCCCTGCTCCGTGTACGGCC | 6 | 1788 |
| 1126392 | 802 | 821 | 10034 | 10053 | GGGCACGACACAGGCAGAGT | 31 | 1789 |
| 1126424 | 884 | 903 | 10116 | 10135 | TAGAAGTCCACGGCACCGGC | 0 | 1790 |
| 1126456 | 1020 | 1039 | 10496 | 10515 | TGCCTCGATGGCGGTGATCT | 85† | 1791 |
| 1126488 | 1223 | 1242 | 13666 | 13685 | AACTCATAGCGGCCGGCGAT | 8 | 1792 |
| 1126520 | 1338 | 1357 | 14399 | 14418 | GGTCCGCGCTGGCATGATGA | 39 | 1793 |
| 1126552 | 1480 | 1499 | 18008 | 18027 | GCATCTTGTTCATGTCGGGA | 72 | 1794 |
| 1126584 | 1630 | 1649 | 21348 | 21367 | CACTGCTATTGAAGAGGCCG | 0 | 1795 |
| 1126616 | 1792 | 1811 | 24979 | 24998 | TTCCCATAACCGTGCACTCA | 27 | 1796 |
| 1126648 | 1969 | 1988 | 25374 | 25393 | TACGCTGCCGCCGGCTCTGC | 0 | 1797 |
| 1126680 | 2057 | 2076 | 26152 | 26171 | GCCATGTGGCGCGCAGACAT | 19 | 1798 |
| 1126712 | 2276 | 2295 | 26534 | 26553 | CGGTCCTTGGCGGCCTCCTC | 0 | 1799 |
| 1126744 | 2350 | 2369 | 26608 | 26627 | AGTTGCGCTTGCTGCCGCTG | 7 | 1800 |
| 1126776 | 2634 | 2653 | 26892 | 26911 | GGCACGGCTTTGTGGATTCT | 92 | 56 |
| 1126808 | 2853 | 2872 | 27111 | 27130 | GGCCCGCATGCCGGGCCTGA | 13 | 1801 |
| 1126840 | 2918 | 2937 | 27176 | 27195 | AGTGCCCCGGCTCTGGACTT | 26 | 1802 |
| 1126872 | 3107 | 3126 | 27365 | 27384 | GAGCAGCCAAGTGGTTCTAC | 66 | 1803 |
| 1126904 | 3404 | 3423 | 27662 | 27681 | GGGTTCTAGAACCCAGTGAC | 4 | 1804 |
| 1126936 | N/A | N/A | 2994 | 3013 | TGCTCACCCTTGTTAGCCAC | 24 | 1805 |
| 1126968 | N/A | N/A | 3086 | 3105 | GGGTTCCCCTAGTAGCCCCG | 16 | 1806 |
| 1127000 | N/A | N/A | 3277 | 3296 | CCCAGGTATCTAGTCTCTCG | 86 | 1807 |
| 1127032 | N/A | N/A | 3357 | 3376 | GGTCATAGGTCTGAAACCCC | 26 | 1808 |
| 1127064 | N/A | N/A | 3444 | 3463 | AGGTCCTCCCACCGCCGCTC | 44 | 1809 |
| 1127096 | N/A | N/A | 3585 | 3604 | ATTCCAGTACGCATGTGTCC | 85 | 1810 |
| 1127128 | N/A | N/A | 3851 | 3870 | CCTGGCGATACCCGGCTGGG | 8 | 1811 |
| 1127160 | N/A | N/A | 4142 | 4161 | GACTACCCGGACTCAGGTTC | 17 | 1812 |
| 1127192 | N/A | N/A | 4468 | 4487 | CGGCCGAGGTCCATAGTTCT | 11 | 1813 |
| 1127224 | N/A | N/A | 4831 | 4850 | TGTCTGGGTGTCCTATCACG | 50 | 1814 |
| 1127256 | N/A | N/A | 5305 | 5324 | TAGCATGTCCATTAGCCAAG | 70 | 1815 |
| 1127288 | N/A | N/A | 5458 | 5477 | CAAGCTTGGCTGTTAGTAAC | 45 | 1816 |
| 1127320 | N/A | N/A | 5897 | 5916 | AGGGACACAGTCGGACCTGA | 17 | 1817 |
| 1127352 | N/A | N/A | 6065 | 6084 | CTCCTCGCCGACCTGGCTTT | 9 | 1818 |
| 1127384 | N/A | N/A | 6987 | 7006 | CCTCTATCCATAGGCCCATT | 83 | 1819 |
| 1127416 | N/A | N/A | 7859 | 7878 | GCTACCCTTCTCCCACTCGC | 48 | 1820 |
| 1127448 | N/A | N/A | 8534 | 8553 | ATCCGTGGTTCTCCCATTTG | 63 | 1821 |
| 1127480 | N/A | N/A | 8910 | 8929 | AATCCTTGGATTAAAGGACC | 8 | 1822 |
| 1127512 | N/A | N/A | 9006 | 9025 | CAAGAATCCCTATGCTTGGA | 19 | 1823 |
| 1127544 | N/A | N/A | 9552 | 9571 | ATGCCATAGGAGCAGCCAGT | 21 | 1824 |
| 1127576 | N/A | N/A | 9674 | 9693 | GGTTAGATTGGACAGACTGA | 51 | 1825 |
| 1127608 | N/A | N/A | 9801 | 9820 | CCGGACAGGGACCTGTAAAT | 17 | 1826 |
| 1127640 | N/A | N/A | 9865 | 9884 | GGGAGAGGTCAATCTGTCAC | 33 | 1827 |
| 1127672 | N/A | N/A | 10162 | 10181 | AGTCCCCCATCTGCCACGGT | 23 | 1828 |
| 1127704 | N/A | N/A | 10578 | 10597 | TTGGCATAGACAGCTGCCTA | 0 | 1829 |
| 1127736 | N/A | N/A | 12016 | 12035 | TGGTCCCCAGCTTAGGACTT | 5 | 1830 |
| 1127768 | N/A | N/A | 12293 | 12312 | CTCACTGAGAACGGATACTA | 14 | 1831 |
| 1127800 | N/A | N/A | 12449 | 12468 | AAGCTTCTTACAGGGACCCA | 26 | 1832 |
| 1127832 | N/A | N/A | 13027 | 13046 | TTCCTATGAGGTCCCCCCTC | 7 | 1833 |
| 1127864 | N/A | N/A | 13396 | 13415 | AGGAGGCCGAATACCCAGGT | 30 | 1834 |
| 1127896 | N/A | N/A | 13595 | 13614 | ACAAGGCACGGTAAAGCCCA | 19 | 1835 |
| 1127928 | N/A | N/A | 14264 | 14283 | GGATCCTGCCATACCCATTC | 15 | 1836 |
| 1127954 | N/A | N/A | 15654 | 15673 | CCGTCTACAGGATTTTCTAG | 95 | 83 |
| 1127961 | N/A | N/A | 15663 | 15682 | AAGTAAATTCCGTCTACAGG | 77 | 1837 |
| 1127993 | N/A | N/A | 16567 | 16586 | TCTCGGCCACTTTCTAGGTT | 83 | 1838 |
| 1128025 | N/A | N/A | 16854 | 16873 | TTAGGACTTGTACTTGTCCT | 0 | 1839 |
| 1128057 | N/A | N/A | 17148 | 17167 | TACCCTTAGGTTTCTAGGAT | 59 | 1840 |
| 1128089 | N/A | N/A | 17951 | 17970 | AGAACGGAGTAATGAGAGGG | 0 | 1841 |
| 1128121 | N/A | N/A | 18235 | 18254 | ACTGAAGTTGCACGAGTCAG | 10 | 1842 |
| 1128153 | N/A | N/A | 19301 | 19320 | AGCCGTGTGCAGCAAGGCCC | 8 | 1843 |
| 1128185 | N/A | N/A | 19496 | 19515 | TAGGGATCTAAAGCAGCTAC | 40 | 1844 |
| 1128217 | N/A | N/A | 19611 | 19630 | CGTCAATGCCCCAGAAAGCC | 27 | 1845 |
| 1128249 | N/A | N/A | 19810 | 19829 | ATAATGAGGTGGGCTGCTTT | 12 | 1846 |
| 1128281 | N/A | N/A | 19963 | 19982 | CTAGTGTGATAGGAAGTCCT | 41 | 1847 |
| 1128313 | N/A | N/A | 21155 | 21174 | GACCACAAATGCACCGGACG | 35 | 1848 |
| 1128345 | N/A | N/A | 21776 | 21795 | CACTCACCCGGTGTGTAGCC | 2 | 1849 |
| 1128377 | N/A | N/A | 21835 | 21854 | GCCCCAAGACATGCTAGCTC | 22 | 1850 |
| 1128409 | N/A | N/A | 21987 | 22006 | ACATCCAGTTCACTAGTCCT | 8 | 1851 |
| 1128441 | N/A | N/A | 22428 | 22447 | AGCACAGCACTGCCGGAGTG | 12 | 1852 |
| 1128473 | N/A | N/A | 24586 | 24605 | TCTTGTACGGACTTAGTCTA | 8 | 1853 |
| 1128505 | N/A | N/A | 24666 | 24685 | CTCACAACCTGTAGGATCGG | 55 | 1854 |
| 1128537 | N/A | N/A | 24910 | 24929 | CGTCTTAATCGCAATAGACG | 11 | 1855 |
| 1128569 | N/A | N/A | 24969 | 24988 | CGTGCACTCAGCTGCGGGAA | 2 | 1856 |
| 1128601 | N/A | N/A | 25525 | 25544 | AGTAGGATGAGACCCTGCAC | 0 | 1857 |
| 1128633 | N/A | N/A | 25584 | 25603 | CCATGAGCCACCATCGCGAT | 6 | 1858 |
| 1128665 | N/A | N/A | 26020 | 26039 | GCACCCCATACAAATAATCC | 5 | 1859 |
| 1128697 | N/A | N/A | 26369 | 26388 | TGCATACGGCGATGTGGGTG | 0 | 1860 |

TABLE 26
Reduction of GYS1 RNA by 5-10-5 MOE gapmers in A431 cells

| | SEQ | SEQ | SEQ | SEQ | | | |
|---|---|---|---|---|---|---|---|
| | ID | ID | ID | ID | | | |
| | NO: 1 | NO: 1 | NO: 2 | NO: 2 | | | SEQ |
| Compound | Start | Stop | Start | Stop | | % | ID |
| Number | Site | Site | Site | Site | Sequence (5′ to 3′) | Reduction | No. |
| 1126265 | 94 | 113 | 2741 | 2760 | TCCTATTGCAAGACCGCACC | 28 | 1861 |
| 1126297 | 174 | 193 | 2821 | 2840 | GAGGTGTCTAGGGAATGCAC | 35 | 1862 |
| 1126329 | 251 | 270 | 2898 | 2917 | GACATGGACAAAGTGCGGTT | 56 | 1863 |
| 1126361 | 439 | 458 | 4597 | 4616 | CGCCCTGCTCCGTGTACGGC | 0 | 1864 |
| 1126393 | 803 | 822 | 10035 | 10054 | CGGGCACGACACAGGCAGAG | 24 | 1865 |
| 1126425 | 885 | 904 | 10117 | 10136 | GTAGAAGTCCACGGCACCGG | 14 | 1866 |
| 1126457 | 1022 | 1041 | 10498 | 10517 | TGTGCCTCGATGGCGGTGAT | 89† | 1867 |
| 1126489 | 1227 | 1246 | 13670 | 13689 | GGAGAACTCATAGCGGCCGG | 22 | 1868 |
| 1126521 | 1339 | 1358 | 14400 | 14419 | TGGTCCGCGCTGGCATGATG | 49 | 1869 |
| 1126553 | 1481 | 1500 | 18009 | 18028 | AGCATCTTGTTCATGTCGGG | 58 | 1870 |
| 1126585 | 1632 | 1651 | 21350 | 21369 | GGCACTGCTATTGAAGAGGC | 16 | 1871 |
| 1126617 | 1793 | 1812 | 24980 | 24999 | ATTCCCATAACCGTGCACTC | 0 | 1872 |
| 1126649 | 1970 | 1989 | 25375 | 25394 | ATACGCTGCCGCCGGCTCTG | 0 | 1873 |
| 1126681 | 2058 | 2077 | 26153 | 26172 | CGCCATGTGGCGCGCAGACA | 31 | 1874 |
| 1126713 | 2279 | 2298 | 26537 | 26556 | CGCCGGTCCTTGGCGGCCTC | 10 | 1875 |
| 1126745 | 2352 | 2371 | 26610 | 26629 | AGAGTTGCGCTTGCTGCCGC | 21 | 1876 |
| 1126777 | 2635 | 2654 | 26893 | 26912 | AGGCACGGCTTTGTGGATTC | 89 | 1877 |
| 1126809 | 2854 | 2873 | 27112 | 27131 | TGGCCCGCATGCCGGGCCTG | 17 | 1878 |
| 1126841 | 2919 | 2938 | 27177 | 27196 | AAGTGCCCCGGCTCTGGACT | 30 | 1879 |
| 1126873 | 3108 | 3127 | 27366 | 27385 | TGAGCAGCCAAGTGGTTCTA | 0 | 1880 |
| 1126905 | 3424 | 3443 | 27682 | 27701 | GAGCCTCGAGGTAAATGTGG | 60 | 1881 |
| 1126937 | N/A | N/A | 2996 | 3015 | CGTGCTCACCCTTGTTAGCC | 17 | 1882 |
| 1126969 | N/A | N/A | 3088 | 3107 | AAGGGTTCCCCTAGTAGCCC | 0 | 1883 |
| 1127001 | N/A | N/A | 3278 | 3297 | ACCCAGGTATCTAGTCTCTC | 87 | 372 |
| 1127033 | N/A | N/A | 3358 | 3377 | GGGTCATAGGTCTGAAACCC | 16 | 1884 |
| 1127065 | N/A | N/A | 3450 | 3469 | ATCCTCAGGTCCTCCCACCG | 32 | 1885 |
| 1127097 | N/A | N/A | 3586 | 3605 | TATTCCAGTACGCATGTGTC | 49 | 1886 |
| 1127129 | N/A | N/A | 3852 | 3871 | CCCTGGCGATACCCGGCTGG | 11 | 1887 |
| 1127161 | N/A | N/A | 4143 | 4162 | TGACTACCCGGACTCAGGTT | 44 | 1888 |
| 1127193 | N/A | N/A | 4469 | 4488 | CCGGCCGAGGTCCATAGTTC | 4 | 1889 |
| 1127225 | N/A | N/A | 4832 | 4851 | CTGTCTGGGTGTCCTATCAC | 68 | 1890 |
| 1127257 | N/A | N/A | 5308 | 5327 | TATTAGCATGTCCATTAGCC | 45 | 1891 |
| 1127289 | N/A | N/A | 5459 | 5478 | CCAAGCTTGGCTGTTAGTAA | 63 | 1892 |
| 1127321 | N/A | N/A | 5898 | 5917 | TAGGGACACAGTCGGACCTG | 17 | 1893 |
| 1127353 | N/A | N/A | 6066 | 6085 | GCTCCTCGCCGACCTGGCTT | 7 | 1894 |
| 1127385 | N/A | N/A | 6988 | 7007 | TCCTCTATCCATAGGCCCAT | 84 | 1895 |
| 1127417 | N/A | N/A | 7860 | 7879 | TGCTACCCTTCTCCCACTCG | 40 | 1896 |
| 1127449 | N/A | N/A | 8536 | 8555 | TCATCCGTGGTTCTCCCATT | 53 | 1897 |
| 1127481 | N/A | N/A | 8911 | 8930 | TAATCCTTGGATTAAAGGAC | 9 | 1898 |
| 1127513 | N/A | N/A | 9008 | 9027 | TCCAAGAATCCCTATGCTTG | 15 | 1899 |
| 1127545 | N/A | N/A | 9554 | 9573 | GAATGCCATAGGAGCAGCCA | 19 | 1900 |
| 1127577 | N/A | N/A | 9675 | 9694 | GGGTTAGATTGGACAGACTG | 53 | 1901 |
| 1127609 | N/A | N/A | 9802 | 9821 | ACCGGACAGGGACCTGTAAA | 2 | 1902 |
| 1127641 | N/A | N/A | 9886 | 9905 | CCCAGTAGGGACAAGGACTC | 0 | 1903 |
| 1127673 | N/A | N/A | 10163 | 10182 | CAGTCCCCCATCTGCCACGG | 4 | 1904 |
| 1127705 | N/A | N/A | 10580 | 10599 | CTTTGGCATAGACAGCTGCC | 21 | 1905 |
| 1127737 | N/A | N/A | 12017 | 12036 | ATGGTCCCCAGCTTAGGACT | 27 | 1906 |
| 1127769 | N/A | N/A | 12294 | 12313 | ACTCACTGAGAACGGATACT | 39 | 1907 |
| 1127801 | N/A | N/A | 12450 | 12469 | CAAGCTTCTTACAGGGACCC | 33 | 1908 |
| 1127833 | N/A | N/A | 13028 | 13047 | GTTCCTATGAGGTCCCCCCT | 44 | 1909 |
| 1127865 | N/A | N/A | 13397 | 13416 | AAGGAGGCCGAATACCCAGG | 38 | 1910 |
| 1127897 | N/A | N/A | 13596 | 13615 | CACAAGGCACGGTAAAGCCC | 0 | 1911 |
| 1127929 | N/A | N/A | 14266 | 14285 | TGGGATCCTGCCATACCCAT | 4 | 1912 |
| 1127954 | N/A | N/A | 15654 | 15673 | CCGTCTACAGGATTTTCTAG | 95 | 83 |
| 1127962 | N/A | N/A | 15668 | 15687 | CCCAAAAGTAAATTCCGTCT | 94 | 1913 |
| 1127994 | N/A | N/A | 16569 | 16588 | AATCTCGGCCACTTTCTAGG | 13 | 1914 |
| 1128026 | N/A | N/A | 16856 | 16875 | TATTAGGACTTGTACTTGTC | 54 | 1915 |
| 1128058 | N/A | N/A | 17149 | 17168 | CTACCCTTAGGTTTCTAGGA | 60 | 1916 |
| 1128090 | N/A | N/A | 17959 | 17978 | TGCATGTGAGAACGGAGTAA | 0 | 1917 |
| 1128122 | N/A | N/A | 18236 | 18255 | AACTGAAGTTGCACGAGTCA | 0 | 1918 |
| 1128154 | N/A | N/A | 19302 | 19321 | GAGCCGTGTGCAGCAAGGCC | 12 | 1919 |
| 1128186 | N/A | N/A | 19497 | 19516 | TTAGGGATCTAAAGCAGCTA | 30 | 1920 |
| 1128218 | N/A | N/A | 19679 | 19698 | GTACTGAAGTCCCTGGACCC | 0 | 1921 |
| 1128250 | N/A | N/A | 19811 | 19830 | CATAATGAGGTGGGCTGCTT | 17 | 1922 |
| 1128282 | N/A | N/A | 19965 | 19984 | AGCTAGTGTGATAGGAAGTC | 39 | 1923 |
| 1128314 | N/A | N/A | 21156 | 21175 | AGACCACAAATGCACCGGAC | 31 | 1924 |
| 1128346 | N/A | N/A | 21777 | 21796 | ACACTCACCCGGTGTGTAGC | 5 | 1925 |
| 1128378 | N/A | N/A | 21836 | 21855 | CGCCCCAAGACATGCTAGCT | 15 | 1926 |
| 1128410 | N/A | N/A | 21988 | 22007 | GACATCCAGTTCACTAGTCC | 0 | 1927 |
| 1128442 | N/A | N/A | 22429 | 22448 | GAGCACAGCACTGCCGGAGT | 14 | 1928 |
| 1128474 | N/A | N/A | 24587 | 24606 | ATCTTGTACGGACTTAGTCT | 7 | 1929 |
| 1128506 | N/A | N/A | 24667 | 24686 | TCTCACAACCTGTAGGATCG | 42 | 1930 |
| 1128538 | N/A | N/A | 24911 | 24930 | CCGTCTTAATCGCAATAGAC | 17 | 1931 |
| 1128570 | N/A | N/A | 24971 | 24990 | ACCGTGCACTCAGCTGCGGG | 0 | 1932 |
| 1128602 | N/A | N/A | 25526 | 25545 | AAGTAGGATGAGACCCTGCA | 16 | 1933 |
| 1128634 | N/A | N/A | 25586 | 25605 | AACCATGAGCCACCATCGCG | 23 | 1934 |
| 1128666 | N/A | N/A | 26026 | 26045 | ACTGCTGCACCCCATACAAA | 4 | 1935 |
| 1128698 | N/A | N/A | 26370 | 26389 | CTGCATACGGCGATGTGGGT | 0 | 1936 |

TABLE 27
Reduction of GYS1 RNA by 5-10-5 MOE gapmers in A431 cells

| | SEQ | SEQ | SEQ | SEQ | | | |
|---|---|---|---|---|---|---|---|
| | ID | ID | ID | ID | | | |
| | NO: 1 | NO: 1 | NO: 2 | NO: 2 | | | SEQ |
| Compound | Start | Stop | Start | Stop | | % | ID |
| Number | Site | Site | Site | Site | Sequence (5′ to 3′) | Reduction | No. |
| 1126266 | 95 | 114 | 2742 | 2761 | TTCCTATTGCAAGACCGCAC | 33 | 1937 |
| 1126298 | 177 | 196 | 2824 | 2843 | CCGGAGGTGTCTAGGGAATG | 20 | 1938 |
| 1126330 | 290 | 309 | 2937 | 2956 | TCGAATTCATCCTCCCAGTC | 59 | 1939 |
| 1126362 | 441 | 460 | 4599 | 4618 | CACGCCCTGCTCCGTGTACG | 10 | 1940 |
| 1126394 | 805 | 824 | 10037 | 10056 | GCCGGGCACGACACAGGCAG | 11 | 1941 |
| 1126426 | 886 | 905 | 10118 | 10137 | TGTAGAAGTCCACGGCACCG | 16 | 1942 |
| 1126458 | 1023 | 1042 | 10499 | 10518 | CTGTGCCTCGATGGCGGTGA | 91† | 1943 |
| 1126490 | 1229 | 1248 | 13672 | 13691 | TTGGAGAACTCATAGCGGCC | 36 | 1944 |
| 1126522 | 1340 | 1359 | 14401 | 14420 | TTGGTCCGCGCTGGCATGAT | 69 | 1945 |
| 1126554 | 1483 | 1502 | 18011 | 18030 | CCAGCATCTTGTTCATGTCG | 30 | 1946 |
| 1126586 | 1633 | 1652 | 21351 | 21370 | CGGCACTGCTATTGAAGAGG | 33 | 1947 |
| 1126618 | 1794 | 1813 | 24981 | 25000 | GATTCCCATAACCGTGCACT | 15 | 1948 |
| 1126650 | 1971 | 1990 | 25376 | 25395 | GATACGCTGCCGCCGGCTCT | 11 | 1949 |
| 1126682 | 2134 | 2153 | 26392 | 26411 | GTGGGTAGCGGTACCCCTGG | 16 | 1950 |
| 1126714 | 2281 | 2300 | 26539 | 26558 | TGCGCCGGTCCTTGGCGGCC | 2 | 1951 |
| 1126746 | 2353 | 2372 | 26611 | 26630 | CAGAGTTGCGCTTGCTGCCG | 40 | 1952 |
| 1126778 | 2636 | 2655 | 26894 | 26913 | AAGGCACGGCTTTGTGGATT | 85 | 1953 |
| 1126810 | 2855 | 2874 | 27113 | 27132 | GTGGCCCGCATGCCGGGCCT | 22 | 1954 |
| 1126842 | 2920 | 2939 | 27178 | 27197 | AAAGTGCCCCGGCTCTGGAC | 30 | 1955 |
| 1126874 | 3109 | 3128 | 27367 | 27386 | ATGAGCAGCCAAGTGGTTCT | 14 | 1956 |
| 1126906 | 3425 | 3444 | 27683 | 27702 | AGAGCCTCGAGGTAAATGTG | 64 | 1957 |
| 1126938 | N/A | N/A | 3036 | 3055 | ATCCACTACTGTCCTTCTCG | 67 | 1958 |
| 1126970 | N/A | N/A | 3089 | 3108 | CAAGGGTTCCCCTAGTAGCC | 20 | 1959 |
| 1127002 | N/A | N/A | 3279 | 3298 | GACCCAGGTATCTAGTCTCT | 56 | 1960 |
| 1127034 | N/A | N/A | 3359 | 3378 | AGGGTCATAGGTCTGAAACC | 36 | 1961 |
| 1127066 | N/A | N/A | 3464 | 3483 | TCTTAAGCAGCCAGATCCTC | 57 | 1962 |
| 1127098 | N/A | N/A | 3587 | 3606 | CTATTCCAGTACGCATGTGT | 60 | 1963 |
| 1127130 | N/A | N/A | 3853 | 3872 | GCCCTGGCGATACCCGGCTG | 28 | 1964 |
| 1127162 | N/A | N/A | 4144 | 4163 | CTGACTACCCGGACTCAGGT | 21 | 1965 |
| 1127194 | N/A | N/A | 4470 | 4489 | CCCGGCCGAGGTCCATAGTT | 13 | 1966 |
| 1127226 | N/A | N/A | 4836 | 4855 | GCATCTGTCTGGGTGTCCTA | 72 | 1967 |
| 1127258 | N/A | N/A | 5309 | 5328 | CTATTAGCATGTCCATTAGC | 28 | 1968 |
| 1127290 | N/A | N/A | 5462 | 5481 | TCTCCAAGCTTGGCTGTTAG | 64 | 1969 |
| 1127322 | N/A | N/A | 5899 | 5918 | TTAGGGACACAGTCGGACCT | 27 | 1970 |
| 1127354 | N/A | N/A | 6068 | 6087 | CCGCTCCTCGCCGACCTGGC | 41 | 1971 |
| 1127386 | N/A | N/A | 7001 | 7020 | CCTGCGACCTCTTTCCTCTA | 60 | 1972 |
| 1127418 | N/A | N/A | 8363 | 8382 | CGTGCCCCCTGCTTACTTTC | 70 | 1973 |
| 1127450 | N/A | N/A | 8537 | 8556 | CTCATCCGTGGTTCTCCCAT | 34 | 1974 |
| 1127482 | N/A | N/A | 8913 | 8932 | GCTAATCCTTGGATTAAAGG | 49 | 1975 |
| 1127514 | N/A | N/A | 9011 | 9030 | GATTCCAAGAATCCCTATGC | 39 | 1976 |
| 1127546 | N/A | N/A | 9555 | 9574 | AGAATGCCATAGGAGCAGCC | 30 | 1977 |
| 1127578 | N/A | N/A | 9676 | 9695 | AGGGTTAGATTGGACAGACT | 76 | 1978 |
| 1127610 | N/A | N/A | 9803 | 9822 | AACCGGACAGGGACCTGTAA | 0 | 1979 |
| 1127642 | N/A | N/A | 9887 | 9906 | CCCCAGTAGGGACAAGGACT | 21 | 1980 |
| 1127674 | N/A | N/A | 10164 | 10183 | GCAGTCCCCCATCTGCCACG | 30 | 1981 |
| 1127706 | N/A | N/A | 10581 | 10600 | GCTTTGGCATAGACAGCTGC | 0 | 1982 |
| 1127738 | N/A | N/A | 12025 | 12044 | GGTAACTGATGGTCCCCAGC | 80 | 1983 |
| 1127770 | N/A | N/A | 12295 | 12314 | TACTCACTGAGAACGGATAC | 41 | 1984 |
| 1127802 | N/A | N/A | 12468 | 12487 | GGATATATCCTCTACTTCCA | 21 | 1985 |
| 1127834 | N/A | N/A | 13100 | 13119 | ATCAATGTTGTGGTTGAATG | 35 | 1986 |
| 1127866 | N/A | N/A | 13398 | 13417 | TAAGGAGGCCGAATACCCAG | 16 | 1987 |
| 1127898 | N/A | N/A | 13597 | 13616 | CCACAAGGCACGGTAAAGCC | 14 | 1988 |
| 1127930 | N/A | N/A | 14268 | 14287 | ACTGGGATCCTGCCATACCC | 2 | 1989 |
| 1127954 | N/A | N/A | 15654 | 15673 | CCGTCTACAGGATTTTCTAG | 95 | 83 |
| 1127963 | N/A | N/A | 15669 | 15688 | GCCCAAAAGTAAATTCCGTC | 93 | 1990 |
| 1127995 | N/A | N/A | 16571 | 16590 | GCAATCTCGGCCACTTTCTA | 64 | 1991 |
| 1128027 | N/A | N/A | 16861 | 16880 | GCTATTATTAGGACTTGTAC | 90 | 469 |
| 1128059 | N/A | N/A | 17150 | 17169 | GCTACCCTTAGGTTTCTAGG | 53 | 1992 |
| 1128091 | N/A | N/A | 17960 | 17979 | ATGCATGTGAGAACGGAGTA | 1 | 1993 |
| 1128123 | N/A | N/A | 18237 | 18256 | CAACTGAAGTTGCACGAGTC | 0 | 1994 |
| 1128155 | N/A | N/A | 19303 | 19322 | GGAGCCGTGTGCAGCAAGGC | 0 | 1995 |
| 1128187 | N/A | N/A | 19499 | 19518 | AGTTAGGGATCTAAAGCAGC | 35 | 1996 |
| 1128219 | N/A | N/A | 19680 | 19699 | AGTACTGAAGTCCCTGGACC | 1 | 1997 |
| 1128251 | N/A | N/A | 19813 | 19832 | TTCATAATGAGGTGGGCTGC | 4 | 1998 |
| 1128283 | N/A | N/A | 19966 | 19985 | GAGCTAGTGTGATAGGAAGT | 47 | 1999 |
| 1128315 | N/A | N/A | 21159 | 21178 | AGGAGACCACAAATGCACCG | 34 | 2000 |
| 1128347 | N/A | N/A | 21778 | 21797 | TACACTCACCCGGTGTGTAG | 16 | 2001 |
| 1128379 | N/A | N/A | 21837 | 21856 | TCGCCCCAAGACATGCTAGC | 2 | 2002 |
| 1128411 | N/A | N/A | 21989 | 22008 | TGACATCCAGTTCACTAGTC | 30 | 2003 |
| 1128443 | N/A | N/A | 22557 | 22576 | CTCCTAATTATCATGCAAGC | 50 | 2004 |
| 1128475 | N/A | N/A | 24588 | 24607 | TATCTTGTACGGACTTAGTC | 12 | 2005 |
| 1128507 | N/A | N/A | 24668 | 24687 | CTCTCACAACCTGTAGGATC | 25 | 2006 |
| 1128539 | N/A | N/A | 24912 | 24931 | ACCGTCTTAATCGCAATAGA | 15 | 2007 |
| 1128571 | N/A | N/A | 25061 | 25080 | CGCTGACCGTAAGCTGAGGG | 44 | 2008 |
| 1128603 | N/A | N/A | 25530 | 25549 | TTACAAGTAGGATGAGACCC | 31 | 2009 |
| 1128635 | N/A | N/A | 25626 | 25645 | GCGATCCTTCCTGTTAGGCC | 65 | 2010 |
| 1128667 | N/A | N/A | 26027 | 26046 | CACTGCTGCACCCCATACAA | 14 | 2011 |
| 1128699 | N/A | N/A | 26371 | 26390 | CCTGCATACGGCGATGTGGG | 0 | 2012 |

TABLE 28
Reduction of GYS1 RNA by 5-10-5 MOE gapmers in A431 cells

| | SEQ | SEQ | SEQ | SEQ | | | |
|---|---|---|---|---|---|---|---|
| | ID | ID | ID | ID | | | |
| | NO: 1 | NO: 1 | NO: 2 | NO: 2 | | | SEQ |
| Compound | Start | Stop | Start | Stop | | % | ID |
| Number | Site | Site | Site | Site | Sequence (5′ to 3′) | Reduction | No. |
| 1126267 | 96 | 115 | 2743 | 2762 | CTTCCTATTGCAAGACCGCA | 8 | 2013 |
| 1126299 | 178 | 197 | 2825 | 2844 | CCCGGAGGTGTCTAGGGAAT | 22 | 2014 |
| 1126331 | 291 | 310 | 2938 | 2957 | GTCGAATTCATCCTCCCAGT | 77 | 2015 |
| 1126363 | 443 | 462 | 4601 | 4620 | CTCACGCCCTGCTCCGTGTA | 0 | 2016 |
| 1126395 | 806 | 825 | 10038 | 10057 | CGCCGGGCACGACACAGGCA | 0 | 2017 |
| 1126427 | 888 | 907 | 10120 | 10139 | GTTGTAGAAGTCCACGGCAC | 23 | 2018 |
| 1126459 | 1025 | 1044 | 10501 | 10520 | TGCTGTGCCTCGATGGCGGT | 77† | 2019 |
| 1126491 | 1230 | 1249 | 13673 | 13692 | GTTGGAGAACTCATAGCGGC | 58 | 2020 |
| 1126523 | 1342 | 1361 | 14403 | 14422 | TGTTGGTCCGCGCTGGCATG | 74 | 2021 |
| 1126555 | 1568 | 1587 | 21286 | 21305 | AGCATATTGTGGGTGCACAC | 40 | 2022 |
| 1126587 | 1634 | 1653 | 21352 | 21371 | TCGGCACTGCTATTGAAGAG | 18 | 2023 |
| 1126619 | 1819 | 1838 | 25006 | 25025 | CGGAGAGATTGGTGGAGATA | 36 | 2024 |
| 1126651 | 1973 | 1992 | 25378 | 25397 | ATGATACGCTGCCGCCGGCT | 7 | 2025 |
| 1126683 | 2135 | 2154 | 26393 | 26412 | CGTGGGTAGCGGTACCCCTG | 0 | 2026 |
| 1126715 | 2282 | 2301 | 26540 | 26559 | TTGCGCCGGTCCTTGGCGGC | 0 | 2027 |
| 1126747 | 2356 | 2375 | 26614 | 26633 | CCACAGAGTTGCGCTTGCTG | 59 | 2028 |
| 1126779 | 2637 | 2656 | 26895 | 26914 | AAAGGCACGGCTTTGTGGAT | 51 | 2029 |
| 1126811 | 2857 | 2876 | 27115 | 27134 | TGGTGGCCCGCATGCCGGGC | 0 | 2030 |
| 1126843 | 2921 | 2940 | 27179 | 27198 | GAAAGTGCCCCGGCTCTGGA | 27 | 2031 |
| 1126875 | 3110 | 3129 | 27368 | 27387 | AATGAGCAGCCAAGTGGTTC | 18 | 2032 |
| 1126907 | 3426 | 3445 | 27684 | 27703 | AAGAGCCTCGAGGTAAATGT | 59 | 2033 |
| 1126939 | N/A | N/A | 3044 | 3063 | GGGCCCCCATCCACTACTGT | 0 | 2034 |
| 1126971 | N/A | N/A | 3090 | 3109 | ACAAGGGTTCCCCTAGTAGC | 20 | 2035 |
| 1127003 | N/A | N/A | 3280 | 3299 | GGACCCAGGTATCTAGTCTC | 23 | 2036 |
| 1127035 | N/A | N/A | 3360 | 3379 | TAGGGTCATAGGTCTGAAAC | 45 | 2037 |
| 1127067 | N/A | N/A | 3482 | 3501 | AGCCCGTCCCATCTTTATTC | 37 | 2038 |
| 1127099 | N/A | N/A | 3588 | 3607 | CCTATTCCAGTACGCATGTG | 64 | 2039 |
| 1127131 | N/A | N/A | 3855 | 3874 | AGGCCCTGGCGATACCCGGC | 9 | 2040 |
| 1127163 | N/A | N/A | 4145 | 4164 | ACTGACTACCCGGACTCAGG | 11 | 2041 |
| 1127195 | N/A | N/A | 4471 | 4490 | CCCCGGCCGAGGTCCATAGT | 25 | 2042 |
| 1127227 | N/A | N/A | 4874 | 4893 | GCCCATGTCTGGGATCCACC | 0 | 2043 |
| 1127259 | N/A | N/A | 5310 | 5329 | GCTATTAGCATGTCCATTAG | 72 | 2044 |
| 1127291 | N/A | N/A | 5597 | 5616 | CCGATATTCCATGCTTCTCT | 84 | 2045 |
| 1127323 | N/A | N/A | 5900 | 5919 | CTTAGGGACACAGTCGGACC | 43 | 2046 |
| 1127355 | N/A | N/A | 6069 | 6088 | CCCGCTCCTCGCCGACCTGG | 21 | 2047 |
| 1127387 | N/A | N/A | 7005 | 7024 | GTCACCTGCGACCTCTTTCC | 63 | 2048 |
| 1127419 | N/A | N/A | 8364 | 8383 | CCGTGCCCCCTGCTTACTTT | 75 | 2049 |
| 1127451 | N/A | N/A | 8538 | 8557 | ACTCATCCGTGGTTCTCCCA | 39 | 2050 |
| 1127483 | N/A | N/A | 8919 | 8938 | GCCAGAGCTAATCCTTGGAT | 40 | 2051 |
| 1127515 | N/A | N/A | 9025 | 9044 | CTCACTTTGAGGCTGATTCC | 17 | 2052 |
| 1127547 | N/A | N/A | 9556 | 9575 | CAGAATGCCATAGGAGCAGC | 8 | 2053 |
| 1127579 | N/A | N/A | 9677 | 9696 | CAGGGTTAGATTGGACAGAC | 82 | 2054 |
| 1127611 | N/A | N/A | 9804 | 9823 | CAACCGGACAGGGACCTGTA | 0 | 2055 |
| 1127643 | N/A | N/A | 9888 | 9907 | TCCCCAGTAGGGACAAGGAC | 0 | 2056 |
| 1127675 | N/A | N/A | 10169 | 10188 | TACTCGCAGTCCCCCATCTG | 0 | 2057 |
| 1127707 | N/A | N/A | 10587 | 10606 | CAACTGGCTTTGGCATAGAC | 41 | 2058 |
| 1127739 | N/A | N/A | 12026 | 12045 | TGGTAACTGATGGTCCCCAG | 59 | 2059 |
| 1127771 | N/A | N/A | 12296 | 12315 | ATACTCACTGAGAACGGATA | 29 | 2060 |
| 1127803 | N/A | N/A | 12471 | 12490 | CTAGGATATATCCTCTACTT | 22 | 2061 |
| 1127835 | N/A | N/A | 13101 | 13120 | GATCAATGTTGTGGTTGAAT | 56 | 2062 |
| 1127867 | N/A | N/A | 13399 | 13418 | TTAAGGAGGCCGAATACCCA | 5 | 2063 |
| 1127899 | N/A | N/A | 13598 | 13617 | CCCACAAGGCACGGTAAAGC | 6 | 2064 |
| 1127931 | N/A | N/A | 14271 | 14290 | ACCACTGGGATCCTGCCATA | 35 | 2065 |
| 1127954 | N/A | N/A | 15654 | 15673 | CCGTCTACAGGATTTTCTAG | 95 | 83 |
| 1127964 | N/A | N/A | 15699 | 15718 | CGTCTCATATTCCAGTTCTG | 78 | 2066 |
| 1127996 | N/A | N/A | 16572 | 16591 | CGCAATCTCGGCCACTTTCT | 32 | 2067 |
| 1128028 | N/A | N/A | 16863 | 16882 | CAGCTATTATTAGGACTTGT | 89 | 2068 |
| 1128060 | N/A | N/A | 17151 | 17170 | AGCTACCCTTAGGTTTCTAG | 45 | 2069 |
| 1128092 | N/A | N/A | 17961 | 17980 | CATGCATGTGAGAACGGAGT | 0 | 2070 |
| 1128124 | N/A | N/A | 18238 | 18257 | GCAACTGAAGTTGCACGAGT | 0 | 2071 |
| 1128156 | N/A | N/A | 19304 | 19323 | TGGAGCCGTGTGCAGCAAGG | 5 | 2072 |
| 1128188 | N/A | N/A | 19502 | 19521 | TGAAGTTAGGGATCTAAAGC | 4 | 2073 |
| 1128220 | N/A | N/A | 19681 | 19700 | AAGTACTGAAGTCCCTGGAC | 0 | 2074 |
| 1128252 | N/A | N/A | 19816 | 19835 | ACATTCATAATGAGGTGGGC | 17 | 2075 |
| 1128284 | N/A | N/A | 19969 | 19988 | ACAGAGCTAGTGTGATAGGA | 75 | 2076 |
| 1128316 | N/A | N/A | 21188 | 21207 | CATGAGCCATGCGGACCCTG | 0 | 2077 |
| 1128348 | N/A | N/A | 21779 | 21798 | CTACACTCACCCGGTGTGTA | 2 | 2078 |
| 1128380 | N/A | N/A | 21838 | 21857 | CTCGCCCCAAGACATGCTAG | 0 | 2079 |
| 1128412 | N/A | N/A | 21990 | 22009 | GTGACATCCAGTTCACTAGT | 0 | 2080 |
| 1128444 | N/A | N/A | 22561 | 22580 | GCGACTCCTAATTATCATGC | 61 | 2081 |
| 1128476 | N/A | N/A | 24589 | 24608 | GTATCTTGTACGGACTTAGT | 37 | 2082 |
| 1128508 | N/A | N/A | 24671 | 24690 | TAACTCTCACAACCTGTAGG | 31 | 2083 |
| 1128540 | N/A | N/A | 24913 | 24932 | TACCGTCTTAATCGCAATAG | 0 | 2084 |
| 1128572 | N/A | N/A | 25141 | 25160 | CCAAGGGTGCAAGCTCCTCC | 23 | 2085 |
| 1128604 | N/A | N/A | 25531 | 25550 | GTTACAAGTAGGATGAGACC | 17 | 2086 |
| 1128636 | N/A | N/A | 25628 | 25647 | ATGCGATCCTTCCTGTTAGG | 38 | 2087 |
| 1128668 | N/A | N/A | 26048 | 26067 | CACCCTTTATGCAGATGAGC | 39 | 2088 |
| 1128700 | N/A | N/A | 26372 | 26391 | GCCTGCATACGGCGATGTGG | 0 | 2089 |

TABLE 29
Reduction of GYS1 RNA by 5-10-5 MOE gapmers in A431 cells

| | SEQ | SEQ | SEQ | SEQ | | | |
|---|---|---|---|---|---|---|---|
| | ID | ID | ID | ID | | | |
| | NO: 1 | NO: 1 | NO: 2 | NO: 2 | | | SEQ |
| Compound | Start | Stop | Start | Stop | | % | ID |
| Number | Site | Site | Site | Site | Sequence (5′ to 3′) | Reduction | No. |
| 1126268 | 98 | 117 | 2745 | 2764 | GGCTTCCTATTGCAAGACCG | 17 | 2090 |
| 1126300 | 180 | 199 | 2827 | 2846 | ACCCCGGAGGTGTCTAGGGA | 0 | 2091 |
| 1126332 | 292 | 311 | 2939 | 2958 | GGTCGAATTCATCCTCCCAG | 72 | 2092 |
| 1126364 | 446 | 465 | 4604 | 4623 | GTCCTCACGCCCTGCTCCGT | 39 | 2093 |
| 1126396 | 808 | 827 | 10040 | 10059 | GTCGCCGGGCACGACACAGG | 10 | 2094 |
| 1126428 | 889 | 908 | 10121 | 10140 | TGTTGTAGAAGTCCACGGCA | 0 | 2095 |
| 1126460 | 1029 | 1048 | 10505 | 10524 | CAAGTGCTGTGCCTCGATGG | 88† | 2096 |
| 1126492 | 1232 | 1251 | 13675 | 13694 | TTGTTGGAGAACTCATAGCG | 31 | 2097 |
| 1126524 | 1343 | 1362 | 14404 | 14423 | TTGTTGGTCCGCGCTGGCAT | 34 | 2098 |
| 1126556 | 1571 | 1590 | 21289 | 21308 | TCCAGCATATTGTGGGTGCA | 39 | 2099 |
| 1126588 | 1635 | 1654 | 21353 | 21372 | GTCGGCACTGCTATTGAAGA | 17 | 2100 |
| 1126620 | 1820 | 1839 | 25007 | 25026 | CCGGAGAGATTGGTGGAGAT | 44 | 2101 |
| 1126652 | 1974 | 1993 | 25379 | 25398 | GATGATACGCTGCCGCCGGC | 7 | 2102 |
| 1126684 | 2136 | 2155 | 26394 | 26413 | CCGTGGGTAGCGGTACCCCT | 0 | 2103 |
| 1126716 | 2283 | 2302 | 26541 | 26560 | GTTGCGCCGGTCCTTGGCGG | 0 | 2104 |
| 1126748 | 2357 | 2376 | 26615 | 26634 | TCCACAGAGTTGCGCTTGCT | 39 | 2105 |
| 1126780 | 2638 | 2657 | 26896 | 26915 | GAAAGGCACGGCTTTGTGGA | 68 | 2106 |
| 1126812 | 2858 | 2877 | 27116 | 27135 | TTGGTGGCCCGCATGCCGGG | 12 | 2107 |
| 1126844 | 2923 | 2942 | 27181 | 27200 | CTGAAAGTGCCCCGGCTCTG | 36 | 2108 |
| 1126876 | 3187 | 3206 | 27445 | 27464 | GAAGAGTAGGATCTGGTCCA | 14 | 2109 |
| 1126908 | 3427 | 3446 | 27685 | 27704 | GAAGAGCCTCGAGGTAAATG | 67 | 2110 |
| 1126940 | N/A | N/A | 3045 | 3064 | CGGGCCCCCATCCACTACTG | 20 | 2111 |
| 1126972 | N/A | N/A | 3091 | 3110 | CACAAGGGTTCCCCTAGTAG | 58 | 2112 |
| 1127004 | N/A | N/A | 3281 | 3300 | AGGACCCAGGTATCTAGTCT | 54 | 2113 |
| 1127036 | N/A | N/A | 3362 | 3381 | GTTAGGGTCATAGGTCTGAA | 91 | 2114 |
| 1127068 | N/A | N/A | 3483 | 3502 | CAGCCCGTCCCATCTTTATT | 5 | 2115 |
| 1127100 | N/A | N/A | 3589 | 3608 | CCCTATTCCAGTACGCATGT | 61 | 2116 |
| 1127132 | N/A | N/A | 3856 | 3875 | CAGGCCCTGGCGATACCCGG | 16 | 2117 |
| 1127164 | N/A | N/A | 4146 | 4165 | GACTGACTACCCGGACTCAG | 38 | 2118 |
| 1127196 | N/A | N/A | 4472 | 4491 | GCCCCGGCCGAGGTCCATAG | 16 | 2119 |
| 1127228 | N/A | N/A | 4876 | 4895 | TCGCCCATGTCTGGGATCCA | 21 | 2120 |
| 1127260 | N/A | N/A | 5311 | 5330 | CGCTATTAGCATGTCCATTA | 83 | 2121 |
| 1127292 | N/A | N/A | 5598 | 5617 | CCCGATATTCCATGCTTCTC | 76 | 2122 |
| 1127324 | N/A | N/A | 5901 | 5920 | CCTTAGGGACACAGTCGGAC | 52 | 2123 |
| 1127356 | N/A | N/A | 6083 | 6102 | AGTGGAGAAGCAGCCCCGCT | 0 | 2124 |
| 1127388 | N/A | N/A | 7012 | 7031 | CATATCTGTCACCTGCGACC | 58 | 2125 |
| 1127420 | N/A | N/A | 8365 | 8384 | TCCGTGCCCCCTGCTTACTT | 84 | 2126 |
| 1127452 | N/A | N/A | 8540 | 8559 | TCACTCATCCGTGGTTCTCC | 48 | 2127 |
| 1127484 | N/A | N/A | 8920 | 8939 | GGCCAGAGCTAATCCTTGGA | 13 | 2128 |
| 1127516 | N/A | N/A | 9032 | 9051 | CGCCAGCCTCACTTTGAGGC | 7 | 2129 |
| 1127548 | N/A | N/A | 9576 | 9595 | GGCAAAGGGACTACAACTCC | 38 | 2130 |
| 1127580 | N/A | N/A | 9678 | 9697 | GCAGGGTTAGATTGGACAGA | 65 | 2131 |
| 1127612 | N/A | N/A | 9805 | 9824 | CCAACCGGACAGGGACCTGT | 0 | 2132 |
| 1127644 | N/A | N/A | 9896 | 9915 | ATCGGCAATCCCCAGTAGGG | 9 | 2133 |
| 1127676 | N/A | N/A | 10170 | 10189 | ATACTCGCAGTCCCCCATCT | 31 | 2134 |
| 1127708 | N/A | N/A | 10588 | 10607 | GCAACTGGCTTTGGCATAGA | 74 | 2135 |
| 1127740 | N/A | N/A | 12028 | 12047 | AATGGTAACTGATGGTCCCC | 60 | 2136 |
| 1127772 | N/A | N/A | 12297 | 12316 | TATACTCACTGAGAACGGAT | 58 | 2137 |
| 1127804 | N/A | N/A | 12473 | 12492 | TCCTAGGATATATCCTCTAC | 6 | 2138 |
| 1127836 | N/A | N/A | 13110 | 13129 | GTTCATTCAGATCAATGTTG | 61 | 2139 |
| 1127868 | N/A | N/A | 13400 | 13419 | ATTAAGGAGGCCGAATACCC | 0 | 2140 |
| 1127900 | N/A | N/A | 13599 | 13618 | ACCCACAAGGCACGGTAAAG | 0 | 2141 |
| 1127932 | N/A | N/A | 14277 | 14296 | GTCAAGACCACTGGGATCCT | 40 | 2142 |
| 1127954 | N/A | N/A | 15654 | 15673 | CCGTCTACAGGATTTTCTAG | 95 | 83 |
| 1127965 | N/A | N/A | 15701 | 15720 | CCCGTCTCATATTCCAGTTC | 63 | 2143 |
| 1127997 | N/A | N/A | 16729 | 16748 | ACGGTCACTCCTCCACTTAA | 69 | 2144 |
| 1128029 | N/A | N/A | 16891 | 16910 | GTACACATGGCAAGCCTTCC | 54 | 2145 |
| 1128061 | N/A | N/A | 17152 | 17171 | CAGCTACCCTTAGGTTTCTA | 29 | 2146 |
| 1128093 | N/A | N/A | 17962 | 17981 | GCATGCATGTGAGAACGGAG | 0 | 2147 |
| 1128125 | N/A | N/A | 18239 | 18258 | AGCAACTGAAGTTGCACGAG | 6 | 2148 |
| 1128157 | N/A | N/A | 19305 | 19324 | GTGGAGCCGTGTGCAGCAAG | 11 | 2149 |
| 1128189 | N/A | N/A | 19543 | 19562 | GAATGACGGTAAGTTCTCAT | 53 | 2150 |
| 1128221 | N/A | N/A | 19686 | 19705 | ACCACAAGTACTGAAGTCCC | 30 | 2151 |
| 1128253 | N/A | N/A | 19827 | 19846 | CGATGGCAGAAACATTCATA | 38 | 2152 |
| 1128285 | N/A | N/A | 19970 | 19989 | GACAGAGCTAGTGTGATAGG | 62 | 2153 |
| 1128317 | N/A | N/A | 21189 | 21208 | TCATGAGCCATGCGGACCCT | 48 | 2154 |
| 1128349 | N/A | N/A | 21780 | 21799 | ACTACACTCACCCGGTGTGT | 14 | 2155 |
| 1128381 | N/A | N/A | 21839 | 21858 | CCTCGCCCCAAGACATGCTA | 25 | 2156 |
| 1128413 | N/A | N/A | 21991 | 22010 | TGTGACATCCAGTTCACTAG | 0 | 2157 |
| 1128445 | N/A | N/A | 22562 | 22581 | CGCGACTCCTAATTATCATG | 49 | 2158 |
| 1128477 | N/A | N/A | 24590 | 24609 | AGTATCTTGTACGGACTTAG | 45 | 2159 |
| 1128509 | N/A | N/A | 24729 | 24748 | GTCCATAGTTGGGAGATAAG | 38 | 2160 |
| 1128541 | N/A | N/A | 24914 | 24933 | CTACCGTCTTAATCGCAATA | 0 | 2161 |
| 1128573 | N/A | N/A | 25142 | 25161 | TCCAAGGGTGCAAGCTCCTC | 20 | 2162 |
| 1128605 | N/A | N/A | 25532 | 25551 | TGTTACAAGTAGGATGAGAC | 52 | 2163 |
| 1128637 | N/A | N/A | 25629 | 25648 | CATGCGATCCTTCCTGTTAG | 30 | 2164 |
| 1128669 | N/A | N/A | 26052 | 26071 | GCCACACCCTTTATGCAGAT | 41 | 2165 |
| 1128701 | N/A | N/A | 26373 | 26392 | GGCCTGCATACGGCGATGTG | 14 | 2166 |

TABLE 30
Reduction of GYS1 RNA by 5-10-5 MOE gapmers in A431 cells

| | SEQ | SEQ | SEQ | SEQ | | | |
|---|---|---|---|---|---|---|---|
| | ID | ID | ID | ID | | | |
| | NO: 1 | NO: 1 | NO: 2 | NO: 2 | | | SEQ |
| Compound | Start | Stop | Start | Stop | | % | ID |
| Number | Site | Site | Site | Site | Sequence (5′ to 3′) | Reduction | No. |
| 1126269 | 99 | 118 | 2746 | 2765 | CGGCTTCCTATTGCAAGACC | 27 | 2167 |
| 1126301 | 181 | 200 | 2828 | 2847 | GACCCCGGAGGTGTCTAGGG | 5 | 2168 |
| 1126333 | 296 | 315 | 2943 | 2962 | TCCAGGTCGAATTCATCCTC | 49 | 2169 |
| 1126365 | 508 | 527 | 4666 | 4685 | TGTTCATGGAATCCAGTGTC | 38 | 2170 |
| 1126397 | 809 | 828 | 10041 | 10060 | AGTCGCCGGGCACGACACAG | 4 | 2171 |
| 1126429 | 890 | 909 | 10122 | 10141 | TTGTTGTAGAAGTCCACGGC | 10 | 2172 |
| 1126461 | 1030 | 1049 | 10506 | 10525 | GCAAGTGCTGTGCCTCGATG | 75† | 2173 |
| 1126493 | 1273 | 1292 | 13716 | 13735 | AGTTGAGCCGAGCCAATGCC | 17 | 2174 |
| 1126525 | 1344 | 1363 | 14405 | 14424 | ATTGTTGGTCCGCGCTGGCA | 40 | 2175 |
| 1126557 | 1572 | 1591 | 21290 | 21309 | ATCCAGCATATTGTGGGTGC | 9 | 2176 |
| 1126589 | 1636 | 1655 | 21354 | 21373 | TGTCGGCACTGCTATTGAAG | 0 | 2177 |
| 1126621 | 1838 | 1857 | 25025 | 25044 | TCCATGAAGCAGCCGAAGCC | 0 | 2178 |
| 1126653 | 1975 | 1994 | 25380 | 25399 | GGATGATACGCTGCCGCCGG | 0 | 2179 |
| 1126685 | 2138 | 2157 | 26396 | 26415 | GGCCGTGGGTAGCGGTACCC | 9 | 2180 |
| 1126717 | 2284 | 2303 | 26542 | 26561 | TGTTGCGCCGGTCCTTGGCG | 12 | 2181 |
| 1126749 | 2359 | 2378 | 26617 | 26636 | TGTCCACAGAGTTGCGCTTG | 13 | 2182 |
| 1126781 | 2639 | 2658 | 26897 | 26916 | AGAAAGGCACGGCTTTGTGG | 68 | 2183 |
| 1126813 | 2860 | 2879 | 27118 | 27137 | ACTTGGTGGCCCGCATGCCG | 0 | 2184 |
| 1126845 | 2924 | 2943 | 27182 | 27201 | TCTGAAAGTGCCCCGGCTCT | 48 | 2185 |
| 1126877 | 3220 | 3239 | 27478 | 27497 | GATTCCCTGGAGGGAGATCT | 0 | 2186 |
| 1126909 | 3428 | 3447 | 27686 | 27705 | GGAAGAGCCTCGAGGTAAAT | 74 | 2187 |
| 1126941 | N/A | N/A | 3047 | 3066 | TCCGGGCCCCCATCCACTAC | 5 | 2188 |
| 1126973 | N/A | N/A | 3092 | 3111 | TCACAAGGGTTCCCCTAGTA | 33 | 2189 |
| 1127005 | N/A | N/A | 3283 | 3302 | TCAGGACCCAGGTATCTAGT | 67 | 2190 |
| 1127037 | N/A | N/A | 3364 | 3383 | CTGTTAGGGTCATAGGTCTG | 75 | 2191 |
| 1127069 | N/A | N/A | 3484 | 3503 | CCAGCCCGTCCCATCTTTAT | 19 | 2192 |
| 1127101 | N/A | N/A | 3590 | 3609 | CCCCTATTCCAGTACGCATG | 66 | 2193 |
| 1127133 | N/A | N/A | 3857 | 3876 | CCAGGCCCTGGCGATACCCG | 28 | 2194 |
| 1127165 | N/A | N/A | 4147 | 4166 | GGACTGACTACCCGGACTCA | 57 | 2195 |
| 1127197 | N/A | N/A | 4473 | 4492 | GGCCCCGGCCGAGGTCCATA | 2 | 2196 |
| 1127229 | N/A | N/A | 4877 | 4896 | TTCGCCCATGTCTGGGATCC | 32 | 2197 |
| 1127261 | N/A | N/A | 5312 | 5331 | ACGCTATTAGCATGTCCATT | 90 | 2198 |
| 1127293 | N/A | N/A | 5601 | 5620 | TTCCCCGATATTCCATGCTT | 47 | 2199 |
| 1127325 | N/A | N/A | 5903 | 5922 | TCCCTTAGGGACACAGTCGG | 44 | 2200 |
| 1127357 | N/A | N/A | 6189 | 6208 | CGTGTTTCTAAGACTTGCTG | 86 | 2201 |
| 1127389 | N/A | N/A | 7013 | 7032 | ACATATCTGTCACCTGCGAC | 56 | 2202 |
| 1127421 | N/A | N/A | 8367 | 8386 | TTTCCGTGCCCCCTGCTTAC | 64 | 2203 |
| 1127453 | N/A | N/A | 8542 | 8561 | CTTCACTCATCCGTGGTTCT | 52 | 2204 |
| 1127485 | N/A | N/A | 8921 | 8940 | AGGCCAGAGCTAATCCTTGG | 15 | 2205 |
| 1127517 | N/A | N/A | 9035 | 9054 | GCCCGCCAGCCTCACTTTGA | 8 | 2206 |
| 1127549 | N/A | N/A | 9582 | 9601 | AACATTGGCAAAGGGACTAC | 0 | 2207 |
| 1127581 | N/A | N/A | 9679 | 9698 | GGCAGGGTTAGATTGGACAG | 63 | 2208 |
| 1127613 | N/A | N/A | 9806 | 9825 | CCCAACCGGACAGGGACCTG | 2 | 2209 |
| 1127645 | N/A | N/A | 9897 | 9916 | AATCGGCAATCCCCAGTAGG | 11 | 2210 |
| 1127677 | N/A | N/A | 10171 | 10190 | CATACTCGCAGTCCCCCATC | 6 | 2211 |
| 1127709 | N/A | N/A | 10589 | 10608 | AGCAACTGGCTTTGGCATAG | 52 | 2212 |
| 1127741 | N/A | N/A | 12029 | 12048 | AAATGGTAACTGATGGTCCC | 63 | 2213 |
| 1127773 | N/A | N/A | 12298 | 12317 | TTATACTCACTGAGAACGGA | 68 | 2214 |
| 1127805 | N/A | N/A | 12478 | 12497 | GCTTCTCCTAGGATATATCC | 50 | 2215 |
| 1127837 | N/A | N/A | 13132 | 13151 | GTGAGGGTCCCATGTTTTAT | 23 | 2216 |
| 1127869 | N/A | N/A | 13401 | 13420 | AATTAAGGAGGCCGAATACC | 0 | 2217 |
| 1127901 | N/A | N/A | 13600 | 13619 | AACCCACAAGGCACGGTAAA | 5 | 2218 |
| 1127933 | N/A | N/A | 14352 | 14371 | CGTTCACCTGCGCAGAAAGA | 0 | 2219 |
| 1127954 | N/A | N/A | 15654 | 15673 | CCGTCTACAGGATTTTCTAG | 94 | 83 |
| 1127966 | N/A | N/A | 15702 | 15721 | CCCCGTCTCATATTCCAGTT | 56 | 2220 |
| 1127998 | N/A | N/A | 16730 | 16749 | CACGGTCACTCCTCCACTTA | 47 | 2221 |
| 1128030 | N/A | N/A | 16892 | 16911 | AGTACACATGGCAAGCCTTC | 34 | 2222 |
| 1128062 | N/A | N/A | 17154 | 17173 | CCCAGCTACCCTTAGGTTTC | 32 | 2223 |
| 1128094 | N/A | N/A | 17963 | 17982 | GGCATGCATGTGAGAACGGA | 14 | 2224 |
| 1128126 | N/A | N/A | 18240 | 18259 | CAGCAACTGAAGTTGCACGA | 0 | 2225 |
| 1128158 | N/A | N/A | 19306 | 19325 | GGTGGAGCCGTGTGCAGCAA | 24 | 2226 |
| 1128190 | N/A | N/A | 19544 | 19563 | AGAATGACGGTAAGTTCTCA | 31 | 2227 |
| 1128222 | N/A | N/A | 19687 | 19706 | GACCACAAGTACTGAAGTCC | 28 | 2228 |
| 1128254 | N/A | N/A | 19828 | 19847 | CCGATGGCAGAAACATTCAT | 0 | 2229 |
| 1128286 | N/A | N/A | 20025 | 20044 | TCCAACCCTAACAAAGGCCC | 6 | 2230 |
| 1128318 | N/A | N/A | 21190 | 21209 | CTCATGAGCCATGCGGACCC | 7 | 2231 |
| 1128350 | N/A | N/A | 21781 | 21800 | CACTACACTCACCCGGTGTG | 10 | 2232 |
| 1128382 | N/A | N/A | 21843 | 21862 | AGTGCCTCGCCCCAAGACAT | 0 | 2233 |
| 1128414 | N/A | N/A | 21997 | 22016 | GTGAACTGTGACATCCAGTT | 8 | 2234 |
| 1128446 | N/A | N/A | 22563 | 22582 | CCGCGACTCCTAATTATCAT | 28 | 2235 |
| 1128478 | N/A | N/A | 24591 | 24610 | CAGTATCTTGTACGGACTTA | 39 | 2236 |
| 1128510 | N/A | N/A | 24730 | 24749 | AGTCCATAGTTGGGAGATAA | 22 | 2237 |
| 1128542 | N/A | N/A | 24915 | 24934 | CCTACCGTCTTAATCGCAAT | 0 | 2238 |
| 1128574 | N/A | N/A | 25144 | 25163 | TCTCCAAGGGTGCAAGCTCC | 0 | 2239 |
| 1128606 | N/A | N/A | 25533 | 25552 | CTGTTACAAGTAGGATGAGA | 44 | 2240 |
| 1128638 | N/A | N/A | 25630 | 25649 | TCATGCGATCCTTCCTGTTA | 42 | 2241 |
| 1128670 | N/A | N/A | 26055 | 26074 | TTGGCCACACCCTTTATGCA | 7 | 2242 |
| 1128702 | N/A | N/A | 26374 | 26393 | GGGCCTGCATACGGCGATGT | 0 | 2243 |

TABLE 31
Reduction of GYS1 RNA by 5-10-5 MOE gapmers in A431 cells

| | SEQ | SEQ | SEQ | SEQ | | | |
|---|---|---|---|---|---|---|---|
| | ID | ID | ID | ID | | | |
| | NO: 1 | NO: 1 | NO: 2 | NO: 2 | | | SEQ |
| Compound | Start | Stop | Start | Stop | | % | ID |
| Number | Site | Site | Site | Site | Sequence (5′ to 3′) | Reduction | No. |
| 1126270 | 100 | 119 | 2747 | 2766 | TCGGCTTCCTATTGCAAGAC | 11 | 2244 |
| 1126302 | 183 | 202 | 2830 | 2849 | GGGACCCCGGAGGTGTCTAG | 0 | 2245 |
| 1126334 | 298 | 317 | 2945 | 2964 | TCTCCAGGTCGAATTCATCC | 55 | 2246 |
| 1126366 | 559 | 578 | 8633 | 8652 | GAGGGCCTCCCTCGATCAGC | 7 | 2247 |
| 1126398 | 810 | 829 | 10042 | 10061 | CAGTCGCCGGGCACGACACA | 3 | 2248 |
| 1126430 | 892 | 911 | 10124 | 10143 | GGTTGTTGTAGAAGTCCACG | 31 | 2249 |
| 1126462 | 1031 | 1050 | 10507 | 10526 | AGCAAGTGCTGTGCCTCGAT | 661 | 2250 |
| 1126494 | 1274 | 1293 | 13717 | 13736 | TAGTTGAGCCGAGCCAATGC | 9 | 2251 |
| 1126526 | 1346 | 1365 | 14407 | 14426 | AAATTGTTGGTCCGCGCTGG | 37 | 2252 |
| 1126558 | 1573 | 1592 | 21291 | 21310 | CATCCAGCATATTGTGGGTG | 13 | 2253 |
| 1126590 | 1637 | 1656 | 21355 | 21374 | CTGTCGGCACTGCTATTGAA | 10 | 2254 |
| 1126622 | 1849 | 1868 | 25036 | 25055 | CGATGTGTTCCTCCATGAAG | 24 | 2255 |
| 1126654 | 1976 | 1995 | 25381 | 25400 | TGGATGATACGCTGCCGCCG | 0 | 2256 |
| 1126686 | 2139 | 2158 | 26397 | 26416 | TGGCCGTGGGTAGCGGTACC | 8 | 2257 |
| 1126718 | 2285 | 2304 | 26543 | 26562 | ATGTTGCGCCGGTCCTTGGC | 7 | 2258 |
| 1126750 | 2360 | 2379 | 26618 | 26637 | GTGTCCACAGAGTTGCGCTT | 17 | 2259 |
| 1126782 | 2640 | 2659 | 26898 | 26917 | GAGAAAGGCACGGCTTTGTG | 60 | 2260 |
| 1126814 | 2861 | 2880 | 27119 | 27138 | AACTTGGTGGCCCGCATGCC | 4 | 2261 |
| 1126846 | 2926 | 2945 | 27184 | 27203 | ACTCTGAAAGTGCCCCGGCT | 22 | 2262 |
| 1126878 | 3225 | 3244 | 27483 | 27502 | AGGCGGATTCCCTGGAGGGA | 41 | 2263 |
| 1126910 | 3429 | 3448 | 27687 | 27706 | TGGAAGAGCCTCGAGGTAAA | 55 | 2264 |
| 1126942 | N/A | N/A | 3048 | 3067 | TTCCGGGCCCCCATCCACTA | 20 | 2265 |
| 1126974 | N/A | N/A | 3093 | 3112 | GTCACAAGGGTTCCCCTAGT | 50 | 2266 |
| 1127006 | N/A | N/A | 3287 | 3306 | CTGTTCAGGACCCAGGTATC | 41 | 2267 |
| 1127038 | N/A | N/A | 3365 | 3384 | GCTGTTAGGGTCATAGGTCT | 85 | 2268 |
| 1127070 | N/A | N/A | 3485 | 3504 | TCCAGCCCGTCCCATCTTTA | 47 | 2269 |
| 1127102 | N/A | N/A | 3591 | 3610 | TCCCCTATTCCAGTACGCAT | 79 | 2270 |
| 1127134 | N/A | N/A | 3951 | 3970 | TGACTAGGGACACCAGCATG | 13 | 2271 |
| 1127166 | N/A | N/A | 4148 | 4167 | AGGACTGACTACCCGGACTC | 46 | 2272 |
| 1127198 | N/A | N/A | 4485 | 4504 | CGTGTGAGGGCAGGCCCCGG | 10 | 2273 |
| 1127230 | N/A | N/A | 4878 | 4897 | ATTCGCCCATGTCTGGGATC | 46 | 2274 |
| 1127262 | N/A | N/A | 5328 | 5347 | CACCGCTAGAAGGTAGACGC | 54 | 2275 |
| 1127294 | N/A | N/A | 5602 | 5621 | CTTCCCCGATATTCCATGCT | 43 | 2276 |
| 1127326 | N/A | N/A | 5904 | 5923 | TTCCCTTAGGGACACAGTCG | 59 | 2277 |
| 1127358 | N/A | N/A | 6190 | 6209 | CCGTGTTTCTAAGACTTGCT | 92 | 2278 |
| 1127390 | N/A | N/A | 7014 | 7033 | CACATATCTGTCACCTGCGA | 74 | 2279 |
| 1127422 | N/A | N/A | 8368 | 8387 | TTTTCCGTGCCCCCTGCTTA | 43 | 2280 |
| 1127454 | N/A | N/A | 8543 | 8562 | TCTTCACTCATCCGTGGTTC | 26 | 2281 |
| 1127486 | N/A | N/A | 8945 | 8964 | GCCCTTGGATGTTCATGTCC | 15 | 2282 |
| 1127518 | N/A | N/A | 9043 | 9062 | TCGGGCAAGCCCGCCAGCCT | 0 | 2283 |
| 1127550 | N/A | N/A | 9584 | 9603 | CCAACATTGGCAAAGGGACT | 7 | 2284 |
| 1127582 | N/A | N/A | 9680 | 9699 | TGGCAGGGTTAGATTGGACA | 87 | 2285 |
| 1127614 | N/A | N/A | 9807 | 9826 | TCCCAACCGGACAGGGACCT | 2 | 2286 |
| 1127646 | N/A | N/A | 9898 | 9917 | GAATCGGCAATCCCCAGTAG | 0 | 2287 |
| 1127678 | N/A | N/A | 10172 | 10191 | GCATACTCGCAGTCCCCCAT | 45 | 2288 |
| 1127710 | N/A | N/A | 10633 | 10652 | CGGTTTATGCTATTTCAACT | 90 | 2289 |
| 1127742 | N/A | N/A | 12060 | 12079 | GGAGCTGTAGTTCTCTATTC | 14 | 2290 |
| 1127774 | N/A | N/A | 12299 | 12318 | CTTATACTCACTGAGAACGG | 58 | 2291 |
| 1127806 | N/A | N/A | 12575 | 12594 | GATCTGATCCACACTGGTGA | 36 | 2292 |
| 1127838 | N/A | N/A | 13155 | 13174 | GGTCACAATATCTGGGATTG | 51† | 2293 |
| 1127870 | N/A | N/A | 13402 | 13421 | GAATTAAGGAGGCCGAATAC | 4 | 2294 |
| 1127902 | N/A | N/A | 13601 | 13620 | GAACCCACAAGGCACGGTAA | 9 | 2295 |
| 1127934 | N/A | N/A | 14353 | 14372 | CCGTTCACCTGCGCAGAAAG | 7 | 2296 |
| 1127954 | N/A | N/A | 15654 | 15673 | CCGTCTACAGGATTTTCTAG | 95 | 83 |
| 1127967 | N/A | N/A | 15703 | 15722 | ACCCCGTCTCATATTCCAGT | 63 | 2297 |
| 1127999 | N/A | N/A | 16738 | 16757 | AACAGCCCCACGGTCACTCC | 54 | 2298 |
| 1128031 | N/A | N/A | 16907 | 16926 | GATGTCATGCCAAAAAGTAC | 17 | 2299 |
| 1128063 | N/A | N/A | 17155 | 17174 | GCCCAGCTACCCTTAGGTTT | 12 | 2300 |
| 1128095 | N/A | N/A | 17964 | 17983 | GGGCATGCATGTGAGAACGG | 0 | 2301 |
| 1128127 | N/A | N/A | 18245 | 18264 | GCCTCCAGCAACTGAAGTTG | 0 | 2302 |
| 1128159 | N/A | N/A | 19307 | 19326 | AGGTGGAGCCGTGTGCAGCA | 43 | 2303 |
| 1128191 | N/A | N/A | 19545 | 19564 | TAGAATGACGGTAAGTTCTC | 32 | 2304 |
| 1128223 | N/A | N/A | 19690 | 19709 | GTAGACCACAAGTACTGAAG | 63 | 2305 |
| 1128255 | N/A | N/A | 19829 | 19848 | CCCGATGGCAGAAACATTCA | 12 | 2306 |
| 1128287 | N/A | N/A | 20672 | 20691 | GCGATGCATCCGTTTTGGCC | 0 | 2307 |
| 1128319 | N/A | N/A | 21191 | 21210 | CCTCATGAGCCATGCGGACC | 13 | 2308 |
| 1128351 | N/A | N/A | 21782 | 21801 | CCACTACACTCACCCGGTGT | 0 | 2309 |
| 1128383 | N/A | N/A | 21844 | 21863 | CAGTGCCTCGCCCCAAGACA | 0 | 2310 |
| 1128415 | N/A | N/A | 22001 | 22020 | CAGTGTGAACTGTGACATCC | 5 | 2311 |
| 1128447 | N/A | N/A | 22565 | 22584 | GACCGCGACTCCTAATTATC | 16 | 2312 |
| 1128479 | N/A | N/A | 24592 | 24611 | CCAGTATCTTGTACGGACTT | 29 | 2313 |
| 1128511 | N/A | N/A | 24733 | 24752 | GAAAGTCCATAGTTGGGAGA | 8 | 2314 |
| 1128543 | N/A | N/A | 24916 | 24935 | GCCTACCGTCTTAATCGCAA | 1 | 2315 |
| 1128575 | N/A | N/A | 25145 | 25164 | GTCTCCAAGGGTGCAAGCTC | 14 | 2316 |
| 1128607 | N/A | N/A | 25534 | 25553 | ACTGTTACAAGTAGGATGAG | 13 | 2317 |
| 1128639 | N/A | N/A | 25805 | 25824 | GCAGTGGGTTTGAACAAGGC | 33 | 2318 |
| 1128671 | N/A | N/A | 26057 | 26076 | TCTTGGCCACACCCTTTATG | 26 | 2319 |
| 1128703 | N/A | N/A | 26375 | 26394 | TGGGCCTGCATACGGCGATG | 2 | 2320 |

TABLE 32
Reduction of GYS1 RNA by 5-10-5 MOE gapmers in A431 cells

| | SEQ | SEQ | SEQ | SEQ | | | |
|---|---|---|---|---|---|---|---|
| | ID | ID | ID | ID | | | |
| | NO: 1 | NO: 1 | NO: 2 | NO: 2 | | | SEQ |
| Compound | Start | Stop | Start | Stop | | % | ID |
| Number | Site | Site | Site | Site | Sequence (5′ to 3′) | Reduction | No. |
| 1126271 | 101 | 120 | 2748 | 2767 | CTCGGCTTCCTATTGCAAGA | 0 | 2321 |
| 1126303 | 184 | 203 | 2831 | 2850 | AGGGACCCCGGAGGTGTCTA | 0 | 2322 |
| 1126335 | 299 | 318 | 2946 | 2965 | TTCTCCAGGTCGAATTCATC | 0 | 2323 |
| 1126367 | 560 | 579 | 8634 | 8653 | AGAGGGCCTCCCTCGATCAG | 0 | 2324 |
| 1126399 | 811 | 830 | 10043 | 10062 | GCAGTCGCCGGGCACGACAC | 0 | 2325 |
| 1126431 | 961 | 980 | 10437 | 10456 | CCCTTTCCATGCAGTATCGG | 0 | 2326 |
| 1126463 | 1032 | 1051 | 10508 | 10527 | GAGCAAGTGCTGTGCCTCGA | 47† | 2327 |
| 1126495 | 1275 | 1294 | 13718 | 13737 | ATAGTTGAGCCGAGCCAATG | 0 | 2328 |
| 1126527 | 1347 | 1366 | 14408 | 14427 | GAAATTGTTGGTCCGCGCTG | 11 | 2329 |
| 1126559 | 1574 | 1593 | 21292 | 21311 | TCATCCAGCATATTGTGGGT | 14 | 2330 |
| 1126591 | 1638 | 1657 | 21356 | 21375 | CCTGTCGGCACTGCTATTGA | 0 | 2331 |
| 1126623 | 1850 | 1869 | 25037 | 25056 | GCGATGTGTTCCTCCATGAA | 45 | 2332 |
| 1126655 | 1977 | 1996 | 25382 | 25401 | CTGGATGATACGCTGCCGCC | 0 | 2333 |
| 1126687 | 2140 | 2159 | 26398 | 26417 | CTGGCCGTGGGTAGCGGTAC | 0 | 2334 |
| 1126719 | 2286 | 2305 | 26544 | 26563 | GATGTTGCGCCGGTCCTTGG | 6 | 2335 |
| 1126751 | 2362 | 2381 | 26620 | 26639 | CCGTGTCCACAGAGTTGCGC | 12 | 2336 |
| 1126783 | 2662 | 2681 | 26920 | 26939 | GATTATGCATATTCTGGAGC | 73 | 2337 |
| 1126815 | 2862 | 2881 | 27120 | 27139 | GAACTTGGTGGCCCGCATGC | 0 | 2338 |
| 1126847 | 2927 | 2946 | 27185 | 27204 | AACTCTGAAAGTGCCCCGGC | 11 | 2339 |
| 1126879 | 3226 | 3245 | 27484 | 27503 | CAGGCGGATTCCCTGGAGGG | 47 | 2340 |
| 1126911 | 3430 | 3449 | 27688 | 27707 | ATGGAAGAGCCTCGAGGTAA | 25 | 2341 |
| 1126943 | N/A | N/A | 3050 | 3069 | AGTTCCGGGCCCCCATCCAC | 28 | 2342 |
| 1126975 | N/A | N/A | 3094 | 3113 | GGTCACAAGGGTTCCCCTAG | 59 | 2343 |
| 1127007 | N/A | N/A | 3289 | 3308 | CCCTGTTCAGGACCCAGGTA | 0 | 2344 |
| 1127039 | N/A | N/A | 3366 | 3385 | TGCTGTTAGGGTCATAGGTC | 93 | 2345 |
| 1127071 | N/A | N/A | 3493 | 3512 | TTACAGTCTCCAGCCCGTCC | 46 | 2346 |
| 1127103 | N/A | N/A | 3592 | 3611 | TTCCCCTATTCCAGTACGCA | 75 | 2347 |
| 1127135 | N/A | N/A | 3952 | 3971 | CTGACTAGGGACACCAGCAT | 12 | 2348 |
| 1127167 | N/A | N/A | 4149 | 4168 | GAGGACTGACTACCCGGACT | 62 | 2349 |
| 1127199 | N/A | N/A | 4503 | 4522 | ACCCACTGTGGGCCCAAGCG | 6 | 2350 |
| 1127231 | N/A | N/A | 4879 | 4898 | CATTCGCCCATGTCTGGGAT | 37 | 2351 |
| 1127263 | N/A | N/A | 5329 | 5348 | GCACCGCTAGAAGGTAGACG | 62 | 2352 |
| 1127295 | N/A | N/A | 5603 | 5622 | TCTTCCCCGATATTCCATGC | 69 | 2353 |
| 1127327 | N/A | N/A | 5905 | 5924 | GTTCCCTTAGGGACACAGTC | 0 | 2354 |
| 1127359 | N/A | N/A | 6191 | 6210 | GCCGTGTTTCTAAGACTTGC | 73 | 2355 |
| 1127391 | N/A | N/A | 7015 | 7034 | TCACATATCTGTCACCTGCG | 81 | 2356 |
| 1127423 | N/A | N/A | 8369 | 8388 | ATTTTCCGTGCCCCCTGCTT | 11 | 2357 |
| 1127455 | N/A | N/A | 8545 | 8564 | TATCTTCACTCATCCGTGGT | 17 | 2358 |
| 1127487 | N/A | N/A | 8946 | 8965 | GGCCCTTGGATGTTCATGTC | 11 | 2359 |
| 1127519 | N/A | N/A | 9045 | 9064 | CCTCGGGCAAGCCCGCCAGC | 0 | 2360 |
| 1127551 | N/A | N/A | 9588 | 9607 | GCACCCAACATTGGCAAAGG | 19 | 2361 |
| 1127583 | N/A | N/A | 9681 | 9700 | CTGGCAGGGTTAGATTGGAC | 68 | 2362 |
| 1127615 | N/A | N/A | 9808 | 9827 | ATCCCAACCGGACAGGGACC | 0 | 2363 |
| 1127647 | N/A | N/A | 9899 | 9918 | AGAATCGGCAATCCCCAGTA | 17 | 2364 |
| 1127679 | N/A | N/A | 10173 | 10192 | GGCATACTCGCAGTCCCCCA | 33 | 2365 |
| 1127711 | N/A | N/A | 10634 | 10653 | TCGGTTTATGCTATTTCAAC | 89 | 2366 |
| 1127743 | N/A | N/A | 12093 | 12112 | TCAAATACAGGTCACCACCC | 0 | 2367 |
| 1127775 | N/A | N/A | 12300 | 12319 | CCTTATACTCACTGAGAACG | 54 | 2368 |
| 1127807 | N/A | N/A | 12576 | 12595 | GGATCTGATCCACACTGGTG | 17 | 2369 |
| 1127839 | N/A | N/A | 13291 | 13310 | CTTAAGACCTAGGTATATGC | 0 | 2370 |
| 1127871 | N/A | N/A | 13408 | 13427 | GCTCAAGAATTAAGGAGGCC | 19 | 2371 |
| 1127903 | N/A | N/A | 13602 | 13621 | AGAACCCACAAGGCACGGTA | 2 | 2372 |
| 1127935 | N/A | N/A | 14354 | 14373 | GCCGTTCACCTGCGCAGAAA | 4 | 2373 |
| 1127954 | N/A | N/A | 15654 | 15673 | CCGTCTACAGGATTTTCTAG | 94 | 83 |
| 1127968 | N/A | N/A | 15704 | 15723 | AACCCCGTCTCATATTCCAG | 60 | 2374 |
| 1128000 | N/A | N/A | 16740 | 16759 | ACAACAGCCCCACGGTCACT | 53 | 2375 |
| 1128032 | N/A | N/A | 16915 | 16934 | GACCCAATGATGTCATGCCA | 80 | 2376 |
| 1128064 | N/A | N/A | 17156 | 17175 | CGCCCAGCTACCCTTAGGTT | 8 | 2377 |
| 1128096 | N/A | N/A | 17990 | 18009 | GAAGGCTCCCACTGCAAGGC | 4 | 2378 |
| 1128128 | N/A | N/A | 18246 | 18265 | CGCCTCCAGCAACTGAAGTT | 20 | 2379 |
| 1128160 | N/A | N/A | 19308 | 19327 | GAGGTGGAGCCGTGTGCAGC | 19 | 2380 |
| 1128192 | N/A | N/A | 19546 | 19565 | ATAGAATGACGGTAAGTTCT | 30 | 2381 |
| 1128224 | N/A | N/A | 19692 | 19711 | ATGTAGACCACAAGTACTGA | 50 | 2382 |
| 1128256 | N/A | N/A | 19831 | 19850 | ATCCCGATGGCAGAAACATT | 7 | 2383 |
| 1128288 | N/A | N/A | 20674 | 20693 | AAGCGATGCATCCGTTTTGG | 35 | 2384 |
| 1128320 | N/A | N/A | 21192 | 21211 | TCCTCATGAGCCATGCGGAC | 9 | 2385 |
| 1128352 | N/A | N/A | 21783 | 21802 | CCCACTACACTCACCCGGTG | 20 | 2386 |
| 1128384 | N/A | N/A | 21845 | 21864 | CCAGTGCCTCGCCCCAAGAC | 10 | 2387 |
| 1128416 | N/A | N/A | 22072 | 22091 | CACTCGGCTGTATTTGTGAA | 15 | 2388 |
| 1128448 | N/A | N/A | 22566 | 22585 | TGACCGCGACTCCTAATTAT | 31 | 2389 |
| 1128480 | N/A | N/A | 24593 | 24612 | GCCAGTATCTTGTACGGACT | 51 | 2390 |
| 1128512 | N/A | N/A | 24734 | 24753 | GGAAAGTCCATAGTTGGGAG | 47 | 2391 |
| 1128544 | N/A | N/A | 24917 | 24936 | CGCCTACCGTCTTAATCGCA | 0 | 2392 |
| 1128576 | N/A | N/A | 25175 | 25194 | CGAGAGCCCCCCCATTTCCT | 18 | 2393 |
| 1128608 | N/A | N/A | 25536 | 25555 | CAACTGTTACAAGTAGGATG | 53 | 2394 |
| 1128640 | N/A | N/A | 25828 | 25847 | GTTCTGTTACTCTAGGATGG | 71 | 2395 |
| 1128672 | N/A | N/A | 26140 | 26159 | GCAGACATATAGTACTAGGG | 73 | 2396 |
| 1128704 | N/A | N/A | 26377 | 26396 | CCTGGGCCTGCATACGGCGA | 8 | 2397 |

TABLE 33
Reduction of GYS1 RNA by 5-10-5 MOE gapmers in A431 cells

| | SEQ | SEQ | SEQ | SEQ | | | |
|---|---|---|---|---|---|---|---|
| | ID | ID | ID | ID | | | |
| | NO: 1 | NO: 1 | NO: 2 | NO: 2 | | | SEQ |
| Compound | Start | Stop | Start | Stop | | % | ID |
| Number | Site | Site | Site | Site | Sequence (5′ to 3′) | Reduction | No. |
| 1126272 | 102 | 121 | 2749 | 2768 | GCTCGGCTTCCTATTGCAAG | 25 | 2398 |
| 1126304 | 185 | 204 | 2832 | 2851 | TAGGGACCCCGGAGGTGTCT | 0 | 2399 |
| 1126336 | 300 | 319 | 2947 | 2966 | GTTCTCCAGGTCGAATTCAT | 51 | 2400 |
| 1126368 | 562 | 581 | 8636 | 8655 | CCAGAGGGCCTCCCTCGATC | 0 | 2401 |
| 1126400 | 813 | 832 | 10045 | 10064 | AGGCAGTCGCCGGGCACGAC | 0 | 2402 |
| 1126432 | 962 | 981 | 10438 | 10457 | GCCCTTTCCATGCAGTATCG | 32 | 2403 |
| 1126464 | 1107 | 1126 | 13206 | 13225 | GTTCTGGAACTCATGCATGG | 91† | 2404 |
| 1126496 | 1276 | 1295 | 13719 | 13738 | GATAGTTGAGCCGAGCCAAT | 22 | 2405 |
| 1126528 | 1348 | 1367 | 14409 | 14428 | TGAAATTGTTGGTCCGCGCT | 8 | 2406 |
| 1126560 | 1576 | 1595 | 21294 | 21313 | AGTCATCCAGCATATTGTGG | 52 | 2407 |
| 1126592 | 1640 | 1659 | 21358 | 21377 | ACCCTGTCGGCACTGCTATT | 26 | 2408 |
| 1126624 | 1851 | 1870 | 25038 | 25057 | TGCGATGTGTTCCTCCATGA | 43 | 2409 |
| 1126656 | 1978 | 1997 | 25383 | 25402 | GCTGGATGATACGCTGCCGC | 1 | 2410 |
| 1126688 | 2141 | 2160 | 26399 | 26418 | GCTGGCCGTGGGTAGCGGTA | 14 | 2411 |
| 1126720 | 2287 | 2306 | 26545 | 26564 | GGATGTTGCGCCGGTCCTTG | 20 | 2412 |
| 1126752 | 2363 | 2382 | 26621 | 26640 | GCCGTGTCCACAGAGTTGCG | 13 | 2413 |
| 1126784 | 2665 | 2684 | 26923 | 26942 | GCTGATTATGCATATTCTGG | 80 | 2414 |
| 1126816 | 2863 | 2882 | 27121 | 27140 | AGAACTTGGTGGCCCGCATG | 33 | 2415 |
| 1126848 | 2929 | 2948 | 27187 | 27206 | CAAACTCTGAAAGTGCCCCG | 32 | 2416 |
| 1126880 | 3229 | 3248 | 27487 | 27506 | CTGCAGGCGGATTCCCTGGA | 7 | 2417 |
| 1126912 | 3431 | 3450 | 27689 | 27708 | GATGGAAGAGCCTCGAGGTA | 33 | 2418 |
| 1126944 | N/A | N/A | 3051 | 3070 | GAGTTCCGGGCCCCCATCCA | 54 | 2419 |
| 1126976 | N/A | N/A | 3095 | 3114 | AGGTCACAAGGGTTCCCCTA | 41 | 2420 |
| 1127008 | N/A | N/A | 3317 | 3336 | CGCAGAAATCCCATCCCCCC | 23 | 2421 |
| 1127040 | N/A | N/A | 3367 | 3386 | ATGCTGTTAGGGTCATAGGT | 92 | 2422 |
| 1127072 | N/A | N/A | 3494 | 3513 | ATTACAGTCTCCAGCCCGTC | 30 | 2423 |
| 1127104 | N/A | N/A | 3594 | 3613 | CCTTCCCCTATTCCAGTACG | 41 | 2424 |
| 1127136 | N/A | N/A | 3953 | 3972 | CCTGACTAGGGACACCAGCA | 38 | 2425 |
| 1127168 | N/A | N/A | 4150 | 4169 | TGAGGACTGACTACCCGGAC | 44 | 2426 |
| 1127200 | N/A | N/A | 4515 | 4534 | CGTGTAGATGCCACCCACTG | 19 | 2427 |
| 1127232 | N/A | N/A | 4880 | 4899 | CCATTCGCCCATGTCTGGGA | 44 | 2428 |
| 1127264 | N/A | N/A | 5330 | 5349 | AGCACCGCTAGAAGGTAGAC | 65 | 2429 |
| 1127296 | N/A | N/A | 5604 | 5623 | CTCTTCCCCGATATTCCATG | 65 | 2430 |
| 1127328 | N/A | N/A | 5906 | 5925 | GGTTCCCTTAGGGACACAGT | 16 | 2431 |
| 1127360 | N/A | N/A | 6192 | 6211 | TGCCGTGTTTCTAAGACTTG | 63 | 2432 |
| 1127392 | N/A | N/A | 7217 | 7236 | GTATCACATCCCGGCTAATT | 60 | 2433 |
| 1127424 | N/A | N/A | 8370 | 8389 | TATTTTCCGTGCCCCCTGCT | 46 | 2434 |
| 1127456 | N/A | N/A | 8549 | 8568 | CTCATATCTTCACTCATCCG | 30 | 2435 |
| 1127488 | N/A | N/A | 8947 | 8966 | GGGCCCTTGGATGTTCATGT | 10 | 2436 |
| 1127520 | N/A | N/A | 9046 | 9065 | TCCTCGGGCAAGCCCGCCAG | 13 | 2437 |
| 1127552 | N/A | N/A | 9596 | 9615 | CGCTGTCTGCACCCAACATT | 9 | 2438 |
| 1127584 | N/A | N/A | 9683 | 9702 | TCCTGGCAGGGTTAGATTGG | 26 | 2439 |
| 1127616 | N/A | N/A | 9809 | 9828 | AATCCCAACCGGACAGGGAC | 1 | 2440 |
| 1127648 | N/A | N/A | 9900 | 9919 | AAGAATCGGCAATCCCCAGT | 12 | 2441 |
| 1127680 | N/A | N/A | 10174 | 10193 | TGGCATACTCGCAGTCCCCC | 18 | 2442 |
| 1127712 | N/A | N/A | 10774 | 10793 | CTGGCGAATATTTTAGACAG | 28 | 2443 |
| 1127744 | N/A | N/A | 12094 | 12113 | CTCAAATACAGGTCACCACC | 14 | 2444 |
| 1127776 | N/A | N/A | 12310 | 12329 | GTAGTTCTCACCTTATACTC | 36 | 2445 |
| 1127808 | N/A | N/A | 12581 | 12600 | AACAGGGATCTGATCCACAC | 70 | 2446 |
| 1127840 | N/A | N/A | 13292 | 13311 | TCTTAAGACCTAGGTATATG | 2 | 2447 |
| 1127872 | N/A | N/A | 13409 | 13428 | CGCTCAAGAATTAAGGAGGC | 15 | 2448 |
| 1127904 | N/A | N/A | 13603 | 13622 | AAGAACCCACAAGGCACGGT | 20 | 2449 |
| 1127936 | N/A | N/A | 14355 | 14374 | TGCCGTTCACCTGCGCAGAA | 5 | 2450 |
| 1127954 | N/A | N/A | 15654 | 15673 | CCGTCTACAGGATTTTCTAG | 94 | 83 |
| 1127969 | N/A | N/A | 15705 | 15724 | CAACCCCGTCTCATATTCCA | 22 | 2451 |
| 1128001 | N/A | N/A | 16742 | 16761 | ACACAACAGCCCCACGGTCA | 48 | 2452 |
| 1128033 | N/A | N/A | 16916 | 16935 | GGACCCAATGATGTCATGCC | 80 | 2453 |
| 1128065 | N/A | N/A | 17157 | 17176 | GCGCCCAGCTACCCTTAGGT | 17 | 2454 |
| 1128097 | N/A | N/A | 17992 | 18011 | GGGAAGGCTCCCACTGCAAG | 8 | 2455 |
| 1128129 | N/A | N/A | 18248 | 18267 | CTCGCCTCCAGCAACTGAAG | 17 | 2456 |
| 1128161 | N/A | N/A | 19310 | 19329 | TAGAGGTGGAGCCGTGTGCA | 33 | 2457 |
| 1128193 | N/A | N/A | 19547 | 19566 | AATAGAATGACGGTAAGTTC | 39 | 2458 |
| 1128225 | N/A | N/A | 19695 | 19714 | CCAATGTAGACCACAAGTAC | 12 | 2459 |
| 1128257 | N/A | N/A | 19832 | 19851 | CATCCCGATGGCAGAAACAT | 0 | 2460 |
| 1128289 | N/A | N/A | 20675 | 20694 | CAAGCGATGCATCCGTTTTG | 27 | 2461 |
| 1128321 | N/A | N/A | 21193 | 21212 | TTCCTCATGAGCCATGCGGA | 0 | 2462 |
| 1128353 | N/A | N/A | 21784 | 21803 | GCCCACTACACTCACCCGGT | 0 | 2463 |
| 1128385 | N/A | N/A | 21902 | 21921 | GAACAGGTGATTACCATTGT | 24 | 2464 |
| 1128417 | N/A | N/A | 22073 | 22092 | ACACTCGGCTGTATTTGTGA | 35 | 2465 |
| 1128449 | N/A | N/A | 22567 | 22586 | CTGACCGCGACTCCTAATTA | 21 | 2466 |
| 1128481 | N/A | N/A | 24596 | 24615 | TGTGCCAGTATCTTGTACGG | 24 | 2467 |
| 1128513 | N/A | N/A | 24738 | 24757 | TGCGGGAAAGTCCATAGTTG | 7 | 2468 |
| 1128545 | N/A | N/A | 24918 | 24937 | TCGCCTACCGTCTTAATCGC | 2 | 2469 |
| 1128577 | N/A | N/A | 25176 | 25195 | CCGAGAGCCCCCCCATTTCC | 6 | 2470 |
| 1128609 | N/A | N/A | 25537 | 25556 | GCAACTGTTACAAGTAGGAT | 79 | 2471 |
| 1128641 | N/A | N/A | 25896 | 25915 | TTGGCCACACCCTTATGCAA | 12 | 2472 |
| 1128673 | N/A | N/A | 26141 | 26160 | CGCAGACATATAGTACTAGG | 30 | 2473 |
| 1128705 | N/A | N/A | 26378 | 26397 | CCCTGGGCCTGCATACGGCG | 0 | 2474 |

TABLE 34
Reduction of GYS1 RNA by 5-10-5 MOE gapmers in A431 cells

| | SEQ | SEQ | SEQ | SEQ | | | |
|---|---|---|---|---|---|---|---|
| | ID | ID | ID | ID | | | |
| | NO: 1 | NO: 1 | NO: 2 | NO: 2 | | | SEQ |
| Compound | Start | Stop | Start | Stop | | % | ID |
| Number | Site | Site | Site | Site | Sequence (5′ to 3′) | Reduction | No. |
| 1126273 | 103 | 122 | 2750 | 2769 | CGCTCGGCTTCCTATTGCAA | 5 | 2475 |
| 1126305 | 186 | 205 | 2833 | 2852 | GTAGGGACCCCGGAGGTGTC | 0 | 2476 |
| 1126337 | 319 | 338 | 2966 | 2985 | CCACTTCGAAGAGCACTGCG | 31 | 2477 |
| 1126369 | 563 | 582 | 8637 | 8656 | ACCAGAGGGCCTCCCTCGAT | 0 | 2478 |
| 1126401 | 814 | 833 | 10046 | 10065 | CAGGCAGTCGCCGGGCACGA | 6 | 2479 |
| 1126433 | 963 | 982 | 10439 | 10458 | CGCCCTTTCCATGCAGTATC | 86 | 2480 |
| 1126465 | 1115 | 1134 | 13214 | 13233 | GCATGGAGGTTCTGGAACTC | 98† | 2481 |
| 1126497 | 1277 | 1296 | 13720 | 13739 | AGATAGTTGAGCCGAGCCAA | 19 | 2482 |
| 1126529 | 1349 | 1368 | 14410 | 14429 | TTGAAATTGTTGGTCCGCGC | 34 | 2483 |
| 1126561 | 1579 | 1598 | 21297 | 21316 | AGGAGTCATCCAGCATATTG | 36 | 2484 |
| 1126593 | 1641 | 1660 | 21359 | 21378 | CACCCTGTCGGCACTGCTAT | 0 | 2485 |
| 1126625 | 1853 | 1872 | 25040 | 25059 | TCTGCGATGTGTTCCTCCAT | 62 | 2486 |
| 1126657 | 1979 | 1998 | 25384 | 25403 | CGCTGGATGATACGCTGCCG | 13 | 2487 |
| 1126689 | 2143 | 2162 | 26401 | 26420 | AGGCTGGCCGTGGGTAGCGG | 0 | 2488 |
| 1126721 | 2288 | 2307 | 26546 | 26565 | CGGATGTTGCGCCGGTCCTT | 0 | 2489 |
| 1126753 | 2365 | 2384 | 26623 | 26642 | TGGCCGTGTCCACAGAGTTG | 17 | 2490 |
| 1126785 | 2667 | 2686 | 26925 | 26944 | GCGCTGATTATGCATATTCT | 50 | 2491 |
| 1126817 | 2864 | 2883 | 27122 | 27141 | CAGAACTTGGTGGCCCGCAT | 54 | 2492 |
| 1126849 | 2952 | 2971 | 27210 | 27229 | GACCATCTGCTCTCAGTTAC | 72 | 2493 |
| 1126881 | 3234 | 3253 | 27492 | 27511 | GTCCTCTGCAGGCGGATTCC | 16 | 2494 |
| 1126913 | 3508 | 3527 | 27766 | 27785 | CAAGCGGTGCAGACACAGCA | 29 | 2495 |
| 1126945 | N/A | N/A | 3052 | 3071 | AGAGTTCCGGGCCCCCATCC | 40 | 2496 |
| 1126977 | N/A | N/A | 3164 | 3183 | AACGAACCATCCCTCTCCCA | 23 | 2497 |
| 1127009 | N/A | N/A | 3324 | 3343 | GTTTGCACGCAGAAATCCCA | 74 | 2498 |
| 1127041 | N/A | N/A | 3368 | 3387 | CATGCTGTTAGGGTCATAGG | 85 | 2499 |
| 1127073 | N/A | N/A | 3495 | 3514 | CATTACAGTCTCCAGCCCGT | 14 | 2500 |
| 1127105 | N/A | N/A | 3615 | 3634 | GACTAACTTAGGACTTCCCA | 53 | 2501 |
| 1127137 | N/A | N/A | 3954 | 3973 | CCCTGACTAGGGACACCAGC | 16 | 2502 |
| 1127169 | N/A | N/A | 4151 | 4170 | CTGAGGACTGACTACCCGGA | 4 | 2503 |
| 1127201 | N/A | N/A | 4516 | 4535 | CCGTGTAGATGCCACCCACT | 27 | 2504 |
| 1127233 | N/A | N/A | 4881 | 4900 | TCCATTCGCCCATGTCTGGG | 64 | 2505 |
| 1127265 | N/A | N/A | 5331 | 5350 | CAGCACCGCTAGAAGGTAGA | 51 | 2506 |
| 1127297 | N/A | N/A | 5663 | 5682 | TAATCCCTGATCTGCCCATC | 17 | 2507 |
| 1127329 | N/A | N/A | 5914 | 5933 | CTGTTCTGGGTTCCCTTAGG | 79 | 2508 |
| 1127361 | N/A | N/A | 6195 | 6214 | CACTGCCGTGTTTCTAAGAC | 53 | 2509 |
| 1127393 | N/A | N/A | 7218 | 7237 | GGTATCACATCCCGGCTAAT | 76 | 2510 |
| 1127425 | N/A | N/A | 8371 | 8390 | ATATTTTCCGTGCCCCCTGC | 53 | 2511 |
| 1127457 | N/A | N/A | 8608 | 8627 | CCCGAAATACACCTGGGATG | 0 | 2512 |
| 1127489 | N/A | N/A | 8948 | 8967 | TGGGCCCTTGGATGTTCATG | 0 | 2513 |
| 1127521 | N/A | N/A | 9047 | 9066 | TTCCTCGGGCAAGCCCGCCA | 7 | 2514 |
| 1127553 | N/A | N/A | 9598 | 9617 | TACGCTGTCTGCACCCAACA | 37 | 2515 |
| 1127585 | N/A | N/A | 9684 | 9703 | GTCCTGGCAGGGTTAGATTG | 36 | 2516 |
| 1127617 | N/A | N/A | 9810 | 9829 | CAATCCCAACCGGACAGGGA | 4 | 2517 |
| 1127649 | N/A | N/A | 9901 | 9920 | AAAGAATCGGCAATCCCCAG | 23 | 2518 |
| 1127681 | N/A | N/A | 10175 | 10194 | CTGGCATACTCGCAGTCCCC | 23 | 2519 |
| 1127713 | N/A | N/A | 10776 | 10795 | GTCTGGCGAATATTTTAGAC | 0 | 2520 |
| 1127745 | N/A | N/A | 12095 | 12114 | CCTCAAATACAGGTCACCAC | 26 | 2521 |
| 1127777 | N/A | N/A | 12313 | 12332 | GTTGTAGTTCTCACCTTATA | 31 | 2522 |
| 1127809 | N/A | N/A | 12582 | 12601 | TAACAGGGATCTGATCCACA | 61 | 2523 |
| 1127841 | N/A | N/A | 13296 | 13315 | CCTCTCTTAAGACCTAGGTA | 31 | 2524 |
| 1127873 | N/A | N/A | 13410 | 13429 | GCGCTCAAGAATTAAGGAGG | 0 | 2525 |
| 1127905 | N/A | N/A | 13605 | 13624 | TAAAGAACCCACAAGGCACG | 0 | 2526 |
| 1127937 | N/A | N/A | 14356 | 14375 | CTGCCGTTCACCTGCGCAGA | 0 | 2527 |
| 1127954 | N/A | N/A | 15654 | 15673 | CCGTCTACAGGATTTTCTAG | 94 | 83 |
| 1127970 | N/A | N/A | 15706 | 15725 | ACAACCCCGTCTCATATTCC | 46 | 2528 |
| 1128002 | N/A | N/A | 16743 | 16762 | CACACAACAGCCCCACGGTC | 46 | 2529 |
| 1128034 | N/A | N/A | 16921 | 16940 | GATGAGGACCCAATGATGTC | 67 | 2530 |
| 1128066 | N/A | N/A | 17158 | 17177 | CGCGCCCAGCTACCCTTAGG | 5 | 2531 |
| 1128098 | N/A | N/A | 17993 | 18012 | CGGGAAGGCTCCCACTGCAA | 25 | 2532 |
| 1128130 | N/A | N/A | 18250 | 18269 | GCCTCGCCTCCAGCAACTGA | 3 | 2533 |
| 1128162 | N/A | N/A | 19312 | 19331 | GGTAGAGGTGGAGCCGTGTG | 2 | 2534 |
| 1128194 | N/A | N/A | 19549 | 19568 | TCAATAGAATGACGGTAAGT | 22 | 2535 |
| 1128226 | N/A | N/A | 19696 | 19715 | CCCAATGTAGACCACAAGTA | 30 | 2536 |
| 1128258 | N/A | N/A | 19834 | 19853 | AGCATCCCGATGGCAGAAAC | 28 | 2537 |
| 1128290 | N/A | N/A | 20676 | 20695 | TCAAGCGATGCATCCGTTTT | 8 | 2538 |
| 1128322 | N/A | N/A | 21194 | 21213 | CTTCCTCATGAGCCATGCGG | 3 | 2539 |
| 1128354 | N/A | N/A | 21785 | 21804 | TGCCCACTACACTCACCCGG | 6 | 2540 |
| 1128386 | N/A | N/A | 21903 | 21922 | AGAACAGGTGATTACCATTG | 18 | 2541 |
| 1128418 | N/A | N/A | 22074 | 22093 | CACACTCGGCTGTATTTGTG | 27 | 2542 |
| 1128450 | N/A | N/A | 22568 | 22587 | GCTGACCGCGACTCCTAATT | 30 | 2543 |
| 1128482 | N/A | N/A | 24597 | 24616 | TTGTGCCAGTATCTTGTACG | 28 | 2544 |
| 1128514 | N/A | N/A | 24739 | 24758 | ATGCGGGAAAGTCCATAGTT | 40 | 2545 |
| 1128546 | N/A | N/A | 24919 | 24938 | ATCGCCTACCGTCTTAATCG | 6 | 2546 |
| 1128578 | N/A | N/A | 25177 | 25196 | CCCGAGAGCCCCCCCATTTC | 0 | 2547 |
| 1128610 | N/A | N/A | 25558 | 25577 | GGTTCATTGCTTAAAGGGAC | 22 | 2548 |
| 1128642 | N/A | N/A | 25897 | 25916 | TTTGGCCACACCCTTATGCA | 16 | 2549 |
| 1128674 | N/A | N/A | 26142 | 26161 | GCGCAGACATATAGTACTAG | 0 | 2550 |
| 1128706 | N/A | N/A | 26381 | 26400 | TACCCCTGGGCCTGCATACG | 9 | 2551 |

TABLE 35
Reduction of GYS1 RNA by 5-10-5 MOE gapmers in A431 cells

| | SEQ | SEQ | SEQ | SEQ | | | |
|---|---|---|---|---|---|---|---|
| | ID | ID | ID | ID | | | |
| | NO: 1 | NO: 1 | NO: 2 | NO: 2 | | | SEQ |
| Compound | Start | Stop | Start | Stop | | % | ID |
| Number | Site | Site | Site | Site | Sequence (5′ to 3′) | Reduction | No. |
| 1126274 | 121 | 140 | 2768 | 2787 | GACGGGAAGCTTGCAAGACG | 29 | 2552 |
| 1126306 | 188 | 207 | 2835 | 2854 | AGGTAGGGACCCCGGAGGTG | 18 | 2553 |
| 1126338 | 321 | 340 | 2968 | 2987 | GGCCACTTCGAAGAGCACTG | 28 | 2554 |
| 1126370 | 565 | 584 | 8639 | 8658 | CCACCAGAGGGCCTCCCTCG | 0 | 2555 |
| 1126402 | 815 | 834 | 10047 | 10066 | ACAGGCAGTCGCCGGGCACG | 0 | 2556 |
| 1126434 | 965 | 984 | 10441 | 10460 | GCCGCCCTTTCCATGCAGTA | 12 | 2557 |
| 1126466 | 1125 | 1144 | 13224 | 13243 | CTTGCTCTGAGCATGGAGGT | 921 | 2558 |
| 1126498 | 1278 | 1297 | 13721 | 13740 | CAGATAGTTGAGCCGAGCCA | 34 | 2559 |
| 1126530 | 1350 | 1369 | 14411 | 14430 | GTTGAAATTGTTGGTCCGCG | 51 | 2560 |
| 1126562 | 1580 | 1599 | 21298 | 21317 | GAGGAGTCATCCAGCATATT | 2 | 2561 |
| 1126594 | 1645 | 1664 | 21363 | 21382 | CCTTCACCCTGTCGGCACTG | 31 | 2562 |
| 1126626 | 1856 | 1875 | 25043 | 25062 | GGGTCTGCGATGTGTTCCTC | 58 | 2563 |
| 1126658 | 1981 | 2000 | 25386 | 25405 | TCCGCTGGATGATACGCTGC | 13 | 2564 |
| 1126690 | 2144 | 2163 | 26402 | 26421 | GAGGCTGGCCGTGGGTAGCG | 1 | 2565 |
| 1126722 | 2289 | 2308 | 26547 | 26566 | ACGGATGTTGCGCCGGTCCT | 15 | 2566 |
| 1126754 | 2366 | 2385 | 26624 | 26643 | GTGGCCGTGTCCACAGAGTT | 12 | 2567 |
| 1126786 | 2706 | 2725 | 26964 | 26983 | TGGCCTCTGGGAAGCGGTCC | 23 | 2568 |
| 1126818 | 2866 | 2885 | 27124 | 27143 | TCCAGAACTTGGTGGCCCGC | 40 | 2569 |
| 1126850 | 2953 | 2972 | 27211 | 27230 | GGACCATCTGCTCTCAGTTA | 78 | 2570 |
| 1126882 | 3235 | 3254 | 27493 | 27512 | TGTCCTCTGCAGGCGGATTC | 23 | 2571 |
| 1126914 | 3509 | 3528 | 27767 | 27786 | CCAAGCGGTGCAGACACAGC | 32 | 2572 |
| 1126946 | N/A | N/A | 3054 | 3073 | TCAGAGTTCCGGGCCCCCAT | 41 | 2573 |
| 1126978 | N/A | N/A | 3166 | 3185 | CAAACGAACCATCCCTCTCC | 31 | 2574 |
| 1127010 | N/A | N/A | 3325 | 3344 | GGTTTGCACGCAGAAATCCC | 58 | 2575 |
| 1127042 | N/A | N/A | 3370 | 3389 | ACCATGCTGTTAGGGTCATA | 90 | 2576 |
| 1127074 | N/A | N/A | 3496 | 3515 | TCATTACAGTCTCCAGCCCG | 27 | 2577 |
| 1127106 | N/A | N/A | 3617 | 3636 | CTGACTAACTTAGGACTTCC | 26 | 2578 |
| 1127138 | N/A | N/A | 3955 | 3974 | TCCCTGACTAGGGACACCAG | 9 | 2579 |
| 1127170 | N/A | N/A | 4153 | 4172 | AGCTGAGGACTGACTACCCG | 54 | 2580 |
| 1127202 | N/A | N/A | 4726 | 4745 | GGCAGGCTGTCCACCCGCTT | 19 | 2581 |
| 1127234 | N/A | N/A | 4882 | 4901 | GTCCATTCGCCCATGTCTGG | 76 | 2582 |
| 1127266 | N/A | N/A | 5332 | 5351 | CCAGCACCGCTAGAAGGTAG | 37 | 2583 |
| 1127298 | N/A | N/A | 5706 | 5725 | CTTTCCGTCTTCACCCTGGG | 64 | 2584 |
| 1127330 | N/A | N/A | 5915 | 5934 | GCTGTTCTGGGTTCCCTTAG | 89 | 2585 |
| 1127362 | N/A | N/A | 6196 | 6215 | CCACTGCCGTGTTTCTAAGA | 64 | 2586 |
| 1127394 | N/A | N/A | 7219 | 7238 | AGGTATCACATCCCGGCTAA | 52 | 2587 |
| 1127426 | N/A | N/A | 8372 | 8391 | AATATTTTCCGTGCCCCCTG | 77 | 2588 |
| 1127458 | N/A | N/A | 8609 | 8628 | GCCCGAAATACACCTGGGAT | 7 | 2589 |
| 1127490 | N/A | N/A | 8955 | 8974 | TAGAGCCTGGGCCCTTGGAT | 0 | 2590 |
| 1127522 | N/A | N/A | 9048 | 9067 | ATTCCTCGGGCAAGCCCGCC | 0 | 2591 |
| 1127554 | N/A | N/A | 9599 | 9618 | GTACGCTGTCTGCACCCAAC | 34 | 2592 |
| 1127586 | N/A | N/A | 9685 | 9704 | AGTCCTGGCAGGGTTAGATT | 64 | 2593 |
| 1127618 | N/A | N/A | 9811 | 9830 | GCAATCCCAACCGGACAGGG | 47 | 2594 |
| 1127650 | N/A | N/A | 9902 | 9921 | AAAAGAATCGGCAATCCCCA | 10 | 2595 |
| 1127682 | N/A | N/A | 10176 | 10195 | CCTGGCATACTCGCAGTCCC | 35 | 2596 |
| 1127714 | N/A | N/A | 10885 | 10904 | CAAATCATGCAATGGCACGA | 19 | 2597 |
| 1127746 | N/A | N/A | 12097 | 12116 | AGCCTCAAATACAGGTCACC | 32 | 2598 |
| 1127778 | N/A | N/A | 12315 | 12334 | GAGTTGTAGTTCTCACCTTA | 41 | 2599 |
| 1127810 | N/A | N/A | 12583 | 12602 | CTAACAGGGATCTGATCCAC | 42 | 2600 |
| 1127842 | N/A | N/A | 13303 | 13322 | ACGCCCTCCTCTCTTAAGAC | 17 | 2601 |
| 1127874 | N/A | N/A | 13426 | 13445 | TGAGCCCATTGTTCCAGCGC | 21 | 2602 |
| 1127906 | N/A | N/A | 13608 | 13627 | GCCTAAAGAACCCACAAGGC | 4 | 2603 |
| 1127938 | N/A | N/A | 14357 | 14376 | GCTGCCGTTCACCTGCGCAG | 19 | 2604 |
| 1127954 | N/A | N/A | 15654 | 15673 | CCGTCTACAGGATTTTCTAG | 96 | 83 |
| 1127971 | N/A | N/A | 15707 | 15726 | GACAACCCCGTCTCATATTC | 52 | 2605 |
| 1128003 | N/A | N/A | 16744 | 16763 | TCACACAACAGCCCCACGGT | 39 | 2606 |
| 1128035 | N/A | N/A | 16922 | 16941 | CGATGAGGACCCAATGATGT | 82 | 2607 |
| 1128067 | N/A | N/A | 17160 | 17179 | GCCGCGCCCAGCTACCCTTA | 15 | 2608 |
| 1128099 | N/A | N/A | 17994 | 18013 | TCGGGAAGGCTCCCACTGCA | 6 | 2609 |
| 1128131 | N/A | N/A | 18252 | 18271 | GTGCCTCGCCTCCAGCAACT | 11 | 2610 |
| 1128163 | N/A | N/A | 19313 | 19332 | GGGTAGAGGTGGAGCCGTGT | 0 | 2611 |
| 1128195 | N/A | N/A | 19550 | 19569 | CTCAATAGAATGACGGTAAG | 32 | 2612 |
| 1128227 | N/A | N/A | 19697 | 19716 | CCCCAATGTAGACCACAAGT | 30 | 2613 |
| 1128259 | N/A | N/A | 19835 | 19854 | CAGCATCCCGATGGCAGAAA | 11 | 2614 |
| 1128291 | N/A | N/A | 21090 | 21109 | TAGTACAACCTGTAAAGGTT | 0 | 2615 |
| 1128323 | N/A | N/A | 21195 | 21214 | ACTTCCTCATGAGCCATGCG | 34 | 2616 |
| 1128355 | N/A | N/A | 21802 | 21821 | ATGACCACGCTGTCCCCTGC | 14 | 2617 |
| 1128387 | N/A | N/A | 21905 | 21924 | GCAGAACAGGTGATTACCAT | 29 | 2618 |
| 1128419 | N/A | N/A | 22076 | 22095 | GCCACACTCGGCTGTATTTG | 14 | 2619 |
| 1128451 | N/A | N/A | 22570 | 22589 | GGGCTGACCGCGACTCCTAA | 18 | 2620 |
| 1128483 | N/A | N/A | 24606 | 24625 | GATCCTTTCTTGTGCCAGTA | 79 | 2621 |
| 1128515 | N/A | N/A | 24740 | 24759 | GATGCGGGAAAGTCCATAGT | 55 | 2622 |
| 1128547 | N/A | N/A | 24920 | 24939 | CATCGCCTACCGTCTTAATC | 12 | 2623 |
| 1128579 | N/A | N/A | 25178 | 25197 | GCCCGAGAGCCCCCCCATTT | 6 | 2624 |
| 1128611 | N/A | N/A | 25559 | 25578 | TGGTTCATTGCTTAAAGGGA | 43 | 2625 |
| 1128643 | N/A | N/A | 25920 | 25939 | CGAATTCTCAAGTGAGTCTC | 40 | 2626 |
| 1128675 | N/A | N/A | 26143 | 26162 | CGCGCAGACATATAGTACTA | 17 | 2627 |
| 1128707 | N/A | N/A | 26383 | 26402 | GGTACCCCTGGGCCTGCATA | 15 | 2628 |

TABLE 36
Reduction of GYS1 RNA by 5-10-5 MOE gapmers in A431 cells

| | SEQ | SEQ | SEQ | SEQ | | | |
|---|---|---|---|---|---|---|---|
| | ID | ID | ID | ID | | | |
| | NO: 1 | NO: 1 | NO: 2 | NO: 2 | | | SEQ |
| Compound | Start | Stop | Start | Stop | | % | ID |
| Number | Site | Site | Site | Site | Sequence (5′ to 3′) | Reduction | No. |
| 1126275 | 122 | 141 | 2769 | 2788 | CGACGGGAAGCTTGCAAGAC | 31 | 2629 |
| 1126307 | 189 | 208 | 2836 | 2855 | CAGGTAGGGACCCCGGAGGT | 8 | 2630 |
| 1126339 | 359 | 378 | 4517 | 4536 | ACCGTGTAGATGCCACCCAC | 38 | 2631 |
| 1126371 | 570 | 589 | 8644 | 8663 | GAGCACCACCAGAGGGCCTC | 7 | 2632 |
| 1126403 | 816 | 835 | 10048 | 10067 | TACAGGCAGTCGCCGGGCAC | 0 | 2633 |
| 1126435 | 966 | 985 | 10442 | 10461 | TGCCGCCCTTTCCATGCAGT | 27 | 2634 |
| 1126467 | 1131 | 1150 | 13230 | 13249 | TCGAGCCTTGCTCTGAGCAT | 27† | 2635 |
| 1126499 | 1280 | 1299 | 13723 | 13742 | AGCAGATAGTTGAGCCGAGC | 61 | 2636 |
| 1126531 | 1351 | 1370 | 14412 | 14431 | CGTTGAAATTGTTGGTCCGC | 60 | 2637 |
| 1126563 | 1581 | 1600 | 21299 | 21318 | TGAGGAGTCATCCAGCATAT | 27 | 2638 |
| 1126595 | 1646 | 1665 | 21364 | 21383 | ACCTTCACCCTGTCGGCACT | 17 | 2639 |
| 1126627 | 1886 | 1905 | 25291 | 25310 | CGGTCAAGAATGTAGATACC | 34 | 2640 |
| 1126659 | 1982 | 2001 | 25387 | 25406 | TTCCGCTGGATGATACGCTG | 15 | 2641 |
| 1126691 | 2145 | 2164 | 26403 | 26422 | CGAGGCTGGCCGTGGGTAGC | 0 | 2642 |
| 1126723 | 2291 | 2310 | 26549 | 26568 | GCACGGATGTTGCGCCGGTC | 26 | 2643 |
| 1126755 | 2429 | 2448 | 26687 | 26706 | CGCTCCTCGCCCAGGGAGCT | 3 | 2644 |
| 1126787 | 2721 | 2740 | 26979 | 26998 | GTAATGGCAGATTCCTGGCC | 37 | 2645 |
| 1126819 | 2867 | 2886 | 27125 | 27144 | TTCCAGAACTTGGTGGCCCG | 34 | 2646 |
| 1126851 | 2958 | 2977 | 27216 | 27235 | ATGGAGGACCATCTGCTCTC | 32 | 2647 |
| 1126883 | 3236 | 3255 | 27494 | 27513 | CTGTCCTCTGCAGGCGGATT | 10 | 2648 |
| 1126915 | 3510 | 3529 | 27768 | 27787 | ACCAAGCGGTGCAGACACAG | 60 | 2649 |
| 1126947 | N/A | N/A | 3056 | 3075 | ACTCAGAGTTCCGGGCCCCC | 42 | 2650 |
| 1126979 | N/A | N/A | 3167 | 3186 | TCAAACGAACCATCCCTCTC | 0 | 2651 |
| 1127011 | N/A | N/A | 3326 | 3345 | AGGTTTGCACGCAGAAATCC | 51 | 2652 |
| 1127043 | N/A | N/A | 3371 | 3390 | GACCATGCTGTTAGGGTCAT | 26 | 2653 |
| 1127075 | N/A | N/A | 3505 | 3524 | CCCAGGCATTCATTACAGTC | 0 | 2654 |
| 1127107 | N/A | N/A | 3618 | 3637 | TCTGACTAACTTAGGACTTC | 30 | 2655 |
| 1127139 | N/A | N/A | 3958 | 3977 | CTCTCCCTGACTAGGGACAC | 0 | 2656 |
| 1127171 | N/A | N/A | 4154 | 4173 | GAGCTGAGGACTGACTACCC | 42 | 2657 |
| 1127203 | N/A | N/A | 4727 | 4746 | TGGCAGGCTGTCCACCCGCT | 8 | 2658 |
| 1127235 | N/A | N/A | 4883 | 4902 | TGTCCATTCGCCCATGTCTG | 73 | 2659 |
| 1127267 | N/A | N/A | 5333 | 5352 | CCCAGCACCGCTAGAAGGTA | 0 | 2660 |
| 1127299 | N/A | N/A | 5731 | 5750 | TTTCTCCTTGGACAACAGCG | 94 | 70 |
| | | | 5765 | 5784 | | | |
| 1127331 | N/A | N/A | 5916 | 5935 | GGCTGTTCTGGGTTCCCTTA | 87 | 2661 |
| 1127363 | N/A | N/A | 6197 | 6216 | GCCACTGCCGTGTTTCTAAG | 85 | 2662 |
| 1127395 | N/A | N/A | 7220 | 7239 | AAGGTATCACATCCCGGCTA | 67 | 2663 |
| 1127427 | N/A | N/A | 8373 | 8392 | CAATATTTTCCGTGCCCCCT | 62 | 2664 |
| 1127459 | N/A | N/A | 8816 | 8835 | TGGGTGGAATGTGTCAGACG | 26 | 2665 |
| 1127491 | N/A | N/A | 8961 | 8980 | CGAGAGTAGAGCCTGGGCCC | 1 | 2666 |
| 1127523 | N/A | N/A | 9050 | 9069 | GAATTCCTCGGGCAAGCCCG | 10 | 2667 |
| 1127555 | N/A | N/A | 9602 | 9621 | AGGGTACGCTGTCTGCACCC | 2 | 2668 |
| 1127587 | N/A | N/A | 9686 | 9705 | AAGTCCTGGCAGGGTTAGAT | 58 | 2669 |
| 1127619 | N/A | N/A | 9812 | 9831 | AGCAATCCCAACCGGACAGG | 32 | 2670 |
| 1127651 | N/A | N/A | 9903 | 9922 | GAAAAGAATCGGCAATCCCC | 0 | 2671 |
| 1127683 | N/A | N/A | 10177 | 10196 | TCCTGGCATACTCGCAGTCC | 13 | 2672 |
| 1127715 | N/A | N/A | 10886 | 10905 | CCAAATCATGCAATGGCACG | 15 | 2673 |
| 1127747 | N/A | N/A | 12100 | 12119 | GAGAGCCTCAAATACAGGTC | 81 | 2674 |
| 1127779 | N/A | N/A | 12338 | 12357 | CTAACCAGTCAAAGGCCTTC | 8 | 2675 |
| 1127811 | N/A | N/A | 12584 | 12603 | GCTAACAGGGATCTGATCCA | 49 | 2676 |
| 1127843 | N/A | N/A | 13319 | 13338 | GATGGTTAGGCTCCCAACGC | 33 | 2677 |
| 1127875 | N/A | N/A | 13498 | 13517 | GTAATACAGAGGCATCACGG | 22 | 2678 |
| 1127907 | N/A | N/A | 13732 | 13751 | CTCACTCTGAGCAGATAGTT | 26 | 2679 |
| 1127939 | N/A | N/A | 14358 | 14377 | CGCTGCCGTTCACCTGCGCA | 8 | 2680 |
| 1127954 | N/A | N/A | 15654 | 15673 | CCGTCTACAGGATTTTCTAG | 96 | 83 |
| 1127972 | N/A | N/A | 15708 | 15727 | TGACAACCCCGTCTCATATT | 36 | 2681 |
| 1128004 | N/A | N/A | 16745 | 16764 | GTCACACAACAGCCCCACGG | 88 | 2682 |
| 1128036 | N/A | N/A | 16923 | 16942 | GCGATGAGGACCCAATGATG | 95 | 2683 |
| 1128068 | N/A | N/A | 17214 | 17233 | GCTGGTAATTGGCCACCTCG | 28 | 2684 |
| 1128100 | N/A | N/A | 17996 | 18015 | TGTCGGGAAGGCTCCCACTG | 0 | 2685 |
| 1128132 | N/A | N/A | 18253 | 18272 | AGTGCCTCGCCTCCAGCAAC | 16 | 2686 |
| 1128164 | N/A | N/A | 19343 | 19362 | CGATAAAACTACCACTCCCA | 0 | 2687 |
| 1128196 | N/A | N/A | 19552 | 19571 | GACTCAATAGAATGACGGTA | 55 | 2688 |
| 1128228 | N/A | N/A | 19698 | 19717 | TCCCCAATGTAGACCACAAG | 25 | 2689 |
| 1128260 | N/A | N/A | 19836 | 19855 | CCAGCATCCCGATGGCAGAA | 12 | 2690 |
| 1128292 | N/A | N/A | 21094 | 21113 | CCACTAGTACAACCTGTAAA | 7 | 2691 |
| 1128324 | N/A | N/A | 21258 | 21277 | AAGACTGCCGCTGCAGGAGC | 10 | 2692 |
| 1128356 | N/A | N/A | 21803 | 21822 | CATGACCACGCTGTCCCCTG | 14 | 2693 |
| 1128388 | N/A | N/A | 21907 | 21926 | TAGCAGAACAGGTGATTACC | 29 | 2694 |
| 1128420 | N/A | N/A | 22077 | 22096 | GGCCACACTCGGCTGTATTT | 10 | 2695 |
| 1128452 | N/A | N/A | 22626 | 22645 | ACTAGTACTATCTATCAATC | 14 | 2696 |
| 1128484 | N/A | N/A | 24620 | 24639 | GTCACAACCTGTAAGATCCT | 63 | 2697 |
| 1128516 | N/A | N/A | 24741 | 24760 | AGATGCGGGAAAGTCCATAG | 31 | 2698 |
| 1128548 | N/A | N/A | 24921 | 24940 | TCATCGCCTACCGTCTTAAT | 13 | 2699 |
| 1128580 | N/A | N/A | 25179 | 25198 | GGCCCGAGAGCCCCCCCATT | 0 | 2700 |
| 1128612 | N/A | N/A | 25560 | 25579 | CTGGTTCATTGCTTAAAGGG | 47 | 2701 |
| 1128644 | N/A | N/A | 25921 | 25940 | CCGAATTCTCAAGTGAGTCT | 64 | 2702 |
| 1128676 | N/A | N/A | 26214 | 26233 | CACTCACCGCATCCGCCTCG | 1 | 2703 |
| 1128708 | N/A | N/A | 26384 | 26403 | CGGTACCCCTGGGCCTGCAT | 12 | 2704 |

TABLE 37
Reduction of GYS1 RNA by 5-10-5 MOE gapmers in A431 cells

| | SEQ | SEQ | SEQ | SEQ | | | |
|---|---|---|---|---|---|---|---|
| | ID | ID | ID | ID | | | |
| | NO: 1 | NO: 1 | NO: 2 | NO: 2 | | | SEQ |
| Compound | Start | Stop | Start | Stop | | % | ID |
| Number | Site | Site | Site | Site | Sequence (5′ to 3′) | Reduction | No. |
| 1126308 | 190 | 209 | 2837 | 2856 | CCAGGTAGGGACCCCGGAGG | 0 | 2706 |
| 1126340 | 360 | 379 | 4518 | 4537 | CACCGTGTAGATGCCACCCA | 32 | 2707 |
| 1126372 | 633 | 652 | 8707 | 8726 | GCAGGTATCCCAGAGCTCTC | 35 | 2708 |
| 1126404 | 817 | 836 | 10049 | 10068 | CTACAGGCAGTCGCCGGGCA | 19 | 2709 |
| 1126436 | 967 | 986 | 10443 | 10462 | CTGCCGCCCTTTCCATGCAG | 20 | 2710 |
| 1126468 | 1132 | 1151 | 13231 | 13250 | TTCGAGCCTTGCTCTGAGCA | 15† | 2711 |
| 1126500 | 1281 | 1300 | 13724 | 13743 | GAGCAGATAGTTGAGCCGAG | 41 | 2712 |
| 1126532 | 1411 | 1430 | 17844 | 17863 | TCACCGTGTTGGCCGTGTCC | 17 | 2713 |
| 1126564 | 1607 | 1626 | 21325 | 21344 | CGGCGGATGGTGGTCAGGAT | 28 | 2714 |
| 1126596 | 1648 | 1667 | 21366 | 21385 | TCACCTTCACCCTGTCGGCA | 26 | 2715 |
| 1126628 | 1888 | 1907 | 25293 | 25312 | GCCGGTCAAGAATGTAGATA | 7 | 2716 |
| 1126660 | 1983 | 2002 | 25388 | 25407 | GTTCCGCTGGATGATACGCT | 19 | 2717 |
| 1126692 | 2147 | 2166 | 26405 | 26424 | ACCGAGGCTGGCCGTGGGTA | 13 | 2718 |
| 1126724 | 2292 | 2311 | 26550 | 26569 | TGCACGGATGTTGCGCCGGT | 4 | 2719 |
| 1126756 | 2431 | 2450 | 26689 | 26708 | TACGCTCCTCGCCCAGGGAG | 14 | 2720 |
| 1126788 | 2727 | 2746 | 26985 | 27004 | CGCAGAGTAATGGCAGATTC | 88 | 2721 |
| 1126820 | 2873 | 2892 | 27131 | 27150 | CGTGGTTTCCAGAACTTGGT | 84 | 365 |
| 1126852 | 2960 | 2979 | 27218 | 27237 | AAATGGAGGACCATCTGCTC | 48 | 2722 |
| 1126884 | 3277 | 3296 | 27535 | 27554 | TGGGAATAAGCCAGGTTAGG | 82 | 2723 |
| 1126916 | 3512 | 3531 | 27770 | 27789 | AAACCAAGCGGTGCAGACAC | 42 | 2724 |
| 1126948 | N/A | N/A | 3057 | 3076 | AACTCAGAGTTCCGGGCCCC | 10 | 2725 |
| 1126980 | N/A | N/A | 3169 | 3188 | AGTCAAACGAACCATCCCTC | 50 | 2726 |
| 1127012 | N/A | N/A | 3327 | 3346 | CAGGTTTGCACGCAGAAATC | 65 | 2727 |
| 1127044 | N/A | N/A | 3372 | 3391 | AGACCATGCTGTTAGGGTCA | 32 | 2728 |
| 1127076 | N/A | N/A | 3506 | 3525 | GCCCAGGCATTCATTACAGT | 0 | 2729 |
| 1127108 | N/A | N/A | 3619 | 3638 | CTCTGACTAACTTAGGACTT | 27 | 2730 |
| 1127140 | N/A | N/A | 4048 | 4067 | TGGCCAATCCAGCTTCTCAC | 31 | 2731 |
| 1127172 | N/A | N/A | 4190 | 4209 | CTGAAGGAATTAGGCACTGG | 81 | 2732 |
| 1127204 | N/A | N/A | 4728 | 4747 | ATGGCAGGCTGTCCACCCGC | 42 | 2733 |
| 1127236 | N/A | N/A | 4885 | 4904 | TCTGTCCATTCGCCCATGTC | 54 | 2734 |
| 1127268 | N/A | N/A | 5403 | 5422 | CCCACACAATGTGCTACCTT | 50 | 2735 |
| 1127300 | N/A | N/A | 5743 | 5762 | CCGCCTGATGGCTTTCTCCT | 56 | 2736 |
| | | | 5777 | 5796 | | | |
| 1127332 | N/A | N/A | 5925 | 5944 | AAGCGACTGGGCTGTTCTGG | 82 | 2737 |
| 1127364 | N/A | N/A | 6199 | 6218 | TAGCCACTGCCGTGTTTCTA | 69 | 2738 |
| 1127396 | N/A | N/A | 7222 | 7241 | ACAAGGTATCACATCCCGGC | 62 | 2739 |
| 1127428 | N/A | N/A | 8374 | 8393 | GCAATATTTTCCGTGCCCCC | 95 | 2740 |
| 1127460 | N/A | N/A | 8817 | 8836 | ATGGGTGGAATGTGTCAGAC | 49 | 2741 |
| 1127492 | N/A | N/A | 8962 | 8981 | TCGAGAGTAGAGCCTGGGCC | 17 | 2742 |
| 1127524 | N/A | N/A | 9052 | 9071 | TAGAATTCCTCGGGCAAGCC | 19 | 2743 |
| 1127556 | N/A | N/A | 9603 | 9622 | AAGGGTACGCTGTCTGCACC | 0 | 2744 |
| 1127588 | N/A | N/A | 9687 | 9706 | TAAGTCCTGGCAGGGTTAGA | 46 | 2745 |
| 1127620 | N/A | N/A | 9813 | 9832 | CAGCAATCCCAACCGGACAG | 21 | 2746 |
| 1127652 | N/A | N/A | 9904 | 9923 | GGAAAAGAATCGGCAATCCC | 14 | 2747 |
| 1127684 | N/A | N/A | 10179 | 10198 | TTTCCTGGCATACTCGCAGT | 21 | 2748 |
| 1127716 | N/A | N/A | 10889 | 10908 | CACCCAAATCATGCAATGGC | 6 | 2749 |
| 1127748 | N/A | N/A | 12111 | 12130 | GTATATAGTCAGAGAGCCTC | 58 | 2750 |
| 1127780 | N/A | N/A | 12339 | 12358 | GCTAACCAGTCAAAGGCCTT | 40 | 2751 |
| 1127812 | N/A | N/A | 12585 | 12604 | GGCTAACAGGGATCTGATCC | 47 | 2752 |
| 1127844 | N/A | N/A | 13320 | 13339 | AGATGGTTAGGCTCCCAACG | 47 | 2753 |
| 1127876 | N/A | N/A | 13499 | 13518 | GGTAATACAGAGGCATCACG | 38 | 2754 |
| 1127908 | N/A | N/A | 13733 | 13752 | CCTCACTCTGAGCAGATAGT | 29 | 2755 |
| 1127940 | N/A | N/A | 14359 | 14378 | TCGCTGCCGTTCACCTGCGC | 7 | 2756 |
| 1127954 | N/A | N/A | 15654 | 15673 | CCGTCTACAGGATTTTCTAG | 95 | 83 |
| 1127973 | N/A | N/A | 15709 | 15728 | CTGACAACCCCGTCTCATAT | 31 | 2757 |
| 1128005 | N/A | N/A | 16746 | 16765 | TGTCACACAACAGCCCCACG | 72 | 2758 |
| 1128037 | N/A | N/A | 16924 | 16943 | TGCGATGAGGACCCAATGAT | 89 | 2759 |
| 1128069 | N/A | N/A | 17217 | 17236 | CTGGCTGGTAATTGGCCACC | 11 | 2760 |
| 1128101 | N/A | N/A | 17998 | 18017 | CATGTCGGGAAGGCTCCCAC | 21 | 2761 |
| 1128133 | N/A | N/A | 18255 | 18274 | TAAGTGCCTCGCCTCCAGCA | 11 | 2762 |
| 1128165 | N/A | N/A | 19344 | 19363 | CCGATAAAACTACCACTCCC | 15 | 2763 |
| 1128197 | N/A | N/A | 19553 | 19572 | AGACTCAATAGAATGACGGT | 43 | 2764 |
| 1128229 | N/A | N/A | 19701 | 19720 | GGCTCCCCAATGTAGACCAC | 20 | 2765 |
| 1128261 | N/A | N/A | 19839 | 19858 | CTCCCAGCATCCCGATGGCA | 12 | 2766 |
| 1128293 | N/A | N/A | 21095 | 21114 | CCCACTAGTACAACCTGTAA | 25 | 2767 |
| 1128325 | N/A | N/A | 21259 | 21278 | AAAGACTGCCGCTGCAGGAG | 33 | 2768 |
| 1128357 | N/A | N/A | 21807 | 21826 | ATGCCATGACCACGCTGTCC | 23 | 2769 |
| 1128389 | N/A | N/A | 21908 | 21927 | GTAGCAGAACAGGTGATTAC | 31 | 2770 |
| 1128421 | N/A | N/A | 22078 | 22097 | TGGCCACACTCGGCTGTATT | 17 | 2771 |
| 1128453 | N/A | N/A | 22627 | 22646 | GACTAGTACTATCTATCAAT | 19 | 2772 |
| 1128485 | N/A | N/A | 24621 | 24640 | TGTCACAACCTGTAAGATCC | 51 | 2773 |
| 1128517 | N/A | N/A | 24742 | 24761 | AAGATGCGGGAAAGTCCATA | 28 | 2774 |
| 1128549 | N/A | N/A | 24922 | 24941 | CTCATCGCCTACCGTCTTAA | 9 | 2775 |
| 1128581 | N/A | N/A | 25181 | 25200 | GCGGCCCGAGAGCCCCCCCA | 17 | 2776 |
| 1128613 | N/A | N/A | 25561 | 25580 | CCTGGTTCATTGCTTAAAGG | 22 | 2777 |
| 1128645 | N/A | N/A | 25922 | 25941 | GCCGAATTCTCAAGTGAGTC | 34 | 2778 |
| 1128677 | N/A | N/A | 26217 | 26236 | GTCCACTCACCGCATCCGCC | 0 | 2779 |
| 1128709 | N/A | N/A | 26385 | 26404 | GCGGTACCCCTGGGCCTGCA | 4 | 2780 |

TABLE 38
Reduction of GYS1 RNA by 5-10-5 MOE gapmers in A431 cells

| | SEQ | SEQ | SEQ | SEQ | | | |
|---|---|---|---|---|---|---|---|
| | ID | ID | ID | ID | | | |
| | NO: 1 | NO: 1 | NO: 2 | NO: 2 | | | SEQ |
| Compound | Start | Stop | Start | Stop | | % | ID |
| Number | Site | Site | Site | Site | Sequence (5′ to 3′) | Reduction | No. |
| 1126277 | 125 | 144 | 2772 | 2791 | GCCCGACGGGAAGCTTGCAA | 24 | 2781 |
| 1126309 | 191 | 210 | 2838 | 2857 | TCCAGGTAGGGACCCCGGAG | 1 | 2782 |
| 1126341 | 362 | 381 | 4520 | 4539 | AGCACCGTGTAGATGCCACC | 0 | 2783 |
| 1126373 | 636 | 655 | 8710 | 8729 | GTTGCAGGTATCCCAGAGCT | 48 | 2784 |
| 1126405 | 819 | 838 | 10051 | 10070 | TGCTACAGGCAGTCGCCGGG | 10 | 2785 |
| 1126437 | 968 | 987 | 10444 | 10463 | GCTGCCGCCCTTTCCATGCA | 25 | 2786 |
| 1126469 | 1134 | 1153 | 13233 | 13252 | GATTCGAGCCTTGCTCTGAG | 56† | 2787 |
| 1126501 | 1282 | 1301 | 13725 | 13744 | TGAGCAGATAGTTGAGCCGA | 18 | 2788 |
| 1126533 | 1420 | 1439 | 17853 | 17872 | ACTTTTCCTTCACCGTGTTG | 65 | 2789 |
| 1126565 | 1609 | 1628 | 21327 | 21346 | TTCGGCGGATGGTGGTCAGG | 26 | 2790 |
| 1126597 | 1670 | 1689 | 21668 | 21687 | GAGAGGAACTCCGGGTGGAA | 44 | 2791 |
| 1126629 | 1889 | 1908 | 25294 | 25313 | CGCCGGTCAAGAATGTAGAT | 0 | 2792 |
| 1126661 | 1985 | 2004 | 25390 | 25409 | CGGTTCCGCTGGATGATACG | 6 | 2793 |
| 1126693 | 2157 | 2176 | 26415 | 26434 | CGACGGTGGCACCGAGGCTG | 14 | 2794 |
| 1126725 | 2293 | 2312 | 26551 | 26570 | GTGCACGGATGTTGCGCCGG | 0 | 2795 |
| 1126757 | 2432 | 2451 | 26690 | 26709 | TTACGCTCCTCGCCCAGGGA | 19 | 2796 |
| 1126789 | 2728 | 2747 | 26986 | 27005 | CCGCAGAGTAATGGCAGATT | 93 | 2797 |
| 1126821 | 2891 | 2910 | 27149 | 27168 | CCATTCGCAGGGACACCACG | 34 | 2798 |
| 1126853 | 2962 | 2981 | 27220 | 27239 | TGAAATGGAGGACCATCTGC | 49 | 2799 |
| 1126885 | 3278 | 3297 | 27536 | 27555 | TTGGGAATAAGCCAGGTTAG | 78 | 2800 |
| 1126917 | 3513 | 3532 | 27771 | 27790 | CAAACCAAGCGGTGCAGACA | 38 | 2801 |
| 1126949 | N/A | N/A | 3058 | 3077 | CAACTCAGAGTTCCGGGCCC | 4 | 2802 |
| 1126981 | N/A | N/A | 3170 | 3189 | AAGTCAAACGAACCATCCCT | 20 | 2803 |
| 1127013 | N/A | N/A | 3328 | 3347 | CCAGGTTTGCACGCAGAAAT | 87 | 2804 |
| 1127045 | N/A | N/A | 3373 | 3392 | TAGACCATGCTGTTAGGGTC | 35 | 2805 |
| 1127077 | N/A | N/A | 3535 | 3554 | TAATAGCTCAGGCCCTCAGC | 34 | 2806 |
| 1127109 | N/A | N/A | 3620 | 3639 | CCTCTGACTAACTTAGGACT | 25 | 2807 |
| 1127141 | N/A | N/A | 4055 | 4074 | CCCCTCATGGCCAATCCAGC | 16 | 2808 |
| 1127173 | N/A | N/A | 4193 | 4212 | GGTCTGAAGGAATTAGGCAC | 44 | 2809 |
| 1127205 | N/A | N/A | 4729 | 4748 | GATGGCAGGCTGTCCACCCG | 3 | 2810 |
| 1127237 | N/A | N/A | 4886 | 4905 | GTCTGTCCATTCGCCCATGT | 71 | 2811 |
| 1127269 | N/A | N/A | 5404 | 5423 | GCCCACACAATGTGCTACCT | 52 | 2812 |
| 1127301 | N/A | N/A | 5780 | 5799 | CTGCCGCCTGATGGCTTTCT | 25 | 2813 |
| 1127333 | N/A | N/A | 5926 | 5945 | GAAGCGACTGGGCTGTTCTG | 60 | 2814 |
| 1127365 | N/A | N/A | 6200 | 6219 | CTAGCCACTGCCGTGTTTCT | 55 | 2815 |
| 1127397 | N/A | N/A | 7223 | 7242 | CACAAGGTATCACATCCCGG | 72 | 2816 |
| 1127429 | N/A | N/A | 8375 | 8394 | TGCAATATTTTCCGTGCCCC | 91 | 2817 |
| 1127461 | N/A | N/A | 8826 | 8845 | GTTTCAGGTATGGGTGGAAT | 56 | 2818 |
| 1127493 | N/A | N/A | 8964 | 8983 | CATCGAGAGTAGAGCCTGGG | 61 | 2819 |
| 1127525 | N/A | N/A | 9053 | 9072 | CTAGAATTCCTCGGGCAAGC | 56 | 2820 |
| 1127557 | N/A | N/A | 9604 | 9623 | CAAGGGTACGCTGTCTGCAC | 29 | 2821 |
| 1127589 | N/A | N/A | 9688 | 9707 | CTAAGTCCTGGCAGGGTTAG | 20 | 2822 |
| 1127621 | N/A | N/A | 9814 | 9833 | GCAGCAATCCCAACCGGACA | 30 | 2823 |
| 1127653 | N/A | N/A | 9905 | 9924 | GGGAAAAGAATCGGCAATCC | 13 | 2824 |
| 1127685 | N/A | N/A | 10180 | 10199 | TTTTCCTGGCATACTCGCAG | 34 | 2825 |
| 1127717 | N/A | N/A | 10891 | 10910 | GCCACCCAAATCATGCAATG | 29 | 2826 |
| 1127749 | N/A | N/A | 12113 | 12132 | GAGTATATAGTCAGAGAGCC | 86 | 2827 |
| 1127781 | N/A | N/A | 12341 | 12360 | GAGCTAACCAGTCAAAGGCC | 46 | 2828 |
| 1127813 | N/A | N/A | 12586 | 12605 | TGGCTAACAGGGATCTGATC | 37 | 2829 |
| 1127845 | N/A | N/A | 13321 | 13340 | TAGATGGTTAGGCTCCCAAC | 47 | 2830 |
| 1127877 | N/A | N/A | 13502 | 13521 | TTAGGTAATACAGAGGCATC | 39 | 2831 |
| 1127909 | N/A | N/A | 13734 | 13753 | GCCTCACTCTGAGCAGATAG | 31 | 2832 |
| 1127941 | N/A | N/A | 14360 | 14379 | CTCGCTGCCGTTCACCTGCG | 10 | 2833 |
| 1127954 | N/A | N/A | 15654 | 15673 | CCGTCTACAGGATTTTCTAG | 96 | 83 |
| 1127974 | N/A | N/A | 15710 | 15729 | CCTGACAACCCCGTCTCATA | 17 | 2834 |
| 1128006 | N/A | N/A | 16752 | 16771 | TAGCAGTGTCACACAACAGC | 68 | 2835 |
| 1128038 | N/A | N/A | 16925 | 16944 | TTGCGATGAGGACCCAATGA | 87 | 2836 |
| 1128070 | N/A | N/A | 17218 | 17237 | TCTGGCTGGTAATTGGCCAC | 0 | 2837 |
| 1128102 | N/A | N/A | 18073 | 18092 | AGGTCCAATCCATACCTGCG | 11 | 2838 |
| 1128134 | N/A | N/A | 18256 | 18275 | CTAAGTGCCTCGCCTCCAGC | 16 | 2839 |
| 1128166 | N/A | N/A | 19345 | 19364 | CCCGATAAAACTACCACTCC | 21 | 2840 |
| 1128198 | N/A | N/A | 19554 | 19573 | TAGACTCAATAGAATGACGG | 45 | 2841 |
| 1128230 | N/A | N/A | 19702 | 19721 | TGGCTCCCCAATGTAGACCA | 15 | 2842 |
| 1128262 | N/A | N/A | 19840 | 19859 | ACTCCCAGCATCCCGATGGC | 11 | 2843 |
| 1128294 | N/A | N/A | 21096 | 21115 | TCCCACTAGTACAACCTGTA | 34 | 2844 |
| 1128326 | N/A | N/A | 21260 | 21279 | GAAAGACTGCCGCTGCAGGA | 34 | 2845 |
| 1128358 | N/A | N/A | 21808 | 21827 | GATGCCATGACCACGCTGTC | 7 | 2846 |
| 1128390 | N/A | N/A | 21912 | 21931 | CGCTGTAGCAGAACAGGTGA | 0 | 2847 |
| 1128422 | N/A | N/A | 22079 | 22098 | TTGGCCACACTCGGCTGTAT | 0 | 2848 |
| 1128454 | N/A | N/A | 22628 | 22647 | AGACTAGTACTATCTATCAA | 11 | 2849 |
| 1128486 | N/A | N/A | 24622 | 24641 | TTGTCACAACCTGTAAGATC | 41 | 2850 |
| 1128518 | N/A | N/A | 24743 | 24762 | CAAGATGCGGGAAAGTCCAT | 17 | 2851 |
| 1128550 | N/A | N/A | 24923 | 24942 | CCTCATCGCCTACCGTCTTA | 0 | 2852 |
| 1128582 | N/A | N/A | 25182 | 25201 | AGCGGCCCGAGAGCCCCCCC | 0 | 2853 |
| 1128614 | N/A | N/A | 25562 | 25581 | GCCTGGTTCATTGCTTAAAG | 10 | 2854 |
| 1128646 | N/A | N/A | 25923 | 25942 | GGCCGAATTCTCAAGTGAGT | 9 | 2855 |
| 1128678 | N/A | N/A | 26219 | 26238 | GGGTCCACTCACCGCATCCG | 0 | 2856 |
| 1128710 | N/A | N/A | 26387 | 26406 | TAGCGGTACCCCTGGGCCTG | 0 | 2857 |

TABLE 39
Reduction of GYS1 RNA by 5-10-5 MOE gapmers in A431 cells

| | SEQ | SEQ | SEQ | SEQ | | | |
|---|---|---|---|---|---|---|---|
| | ID | ID | ID | ID | | | |
| | NO: 1 | NO: 1 | NO: 2 | NO: 2 | | | SEQ |
| Compound | Start | Stop | Start | Stop | | % | ID |
| Number | Site | Site | Site | Site | Sequence (5′ to 3′) | Reduction | No. |
| 1126278 | 126 | 145 | 2773 | 2792 | TGCCCGACGGGAAGCTTGCA | 6 | 2858 |
| 1126310 | 192 | 211 | 2839 | 2858 | CTCCAGGTAGGGACCCCGGA | 8 | 2859 |
| 1126342 | 363 | 382 | 4521 | 4540 | CAGCACCGTGTAGATGCCAC | 12 | 2860 |
| 1126374 | 638 | 657 | 8712 | 8731 | ATGTTGCAGGTATCCCAGAG | 52 | 2861 |
| 1126406 | 820 | 839 | 10052 | 10071 | TTGCTACAGGCAGTCGCCGG | 3 | 2862 |
| 1126438 | 969 | 988 | 10445 | 10464 | GGCTGCCGCCCTTTCCATGC | 6 | 2863 |
| 1126470 | 1135 | 1154 | 13234 | 13253 | GGATTCGAGCCTTGCTCTGA | 52† | 2864 |
| 1126502 | 1283 | 1302 | 13726 | 13745 | CTGAGCAGATAGTTGAGCCG | 28 | 2865 |
| 1126534 | 1433 | 1452 | 17866 | 17885 | AGCTTCCTCCCGAACTTTTC | 35 | 2866 |
| 1126566 | 1610 | 1629 | 21328 | 21347 | ATTCGGCGGATGGTGGTCAG | 16 | 2867 |
| 1126598 | 1716 | 1735 | 21714 | 21733 | ACGGACAAACTCCTCATAGT | 10 | 2868 |
| 1126630 | 1891 | 1910 | 25296 | 25315 | ACCGCCGGTCAAGAATGTAG | 16 | 2869 |
| 1126662 | 1986 | 2005 | 25391 | 25410 | GCGGTTCCGCTGGATGATAC | 0 | 2870 |
| 1126694 | 2158 | 2177 | 26416 | 26435 | GCGACGGTGGCACCGAGGCT | 17 | 2871 |
| 1126726 | 2294 | 2313 | 26552 | 26571 | GGTGCACGGATGTTGCGCCG | 12 | 2872 |
| 1126758 | 2435 | 2454 | 26693 | 26712 | TAGTTACGCTCCTCGCCCAG | 11 | 2873 |
| 1126790 | 2729 | 2748 | 26987 | 27006 | ACCGCAGAGTAATGGCAGAT | 85 | 2874 |
| 1126822 | 2892 | 2911 | 27150 | 27169 | CCCATTCGCAGGGACACCAC | 4 | 2875 |
| 1126854 | 2963 | 2982 | 27221 | 27240 | TTGAAATGGAGGACCATCTG | 43 | 2876 |
| 1126886 | 3279 | 3298 | 27537 | 27556 | GTTGGGAATAAGCCAGGTTA | 82 | 2877 |
| 1126918 | 3515 | 3534 | 27773 | 27792 | TGCAAACCAAGCGGTGCAGA | 34 | 2878 |
| 1126950 | N/A | N/A | 3059 | 3078 | ACAACTCAGAGTTCCGGGCC | 29 | 2879 |
| 1126982 | N/A | N/A | 3171 | 3190 | TAAGTCAAACGAACCATCCC | 26 | 2880 |
| 1127014 | N/A | N/A | 3329 | 3348 | CCCAGGTTTGCACGCAGAAA | 85 | 2881 |
| 1127046 | N/A | N/A | 3375 | 3394 | CCTAGACCATGCTGTTAGGG | 32 | 2882 |
| 1127078 | N/A | N/A | 3536 | 3555 | CTAATAGCTCAGGCCCTCAG | 14 | 2883 |
| 1127110 | N/A | N/A | 3621 | 3640 | GCCTCTGACTAACTTAGGAC | 62 | 2884 |
| 1127142 | N/A | N/A | 4062 | 4081 | GGGAGACCCCCTCATGGCCA | 19 | 2885 |
| 1127174 | N/A | N/A | 4195 | 4214 | TTGGTCTGAAGGAATTAGGC | 91 | 2886 |
| 1127206 | N/A | N/A | 4730 | 4749 | CGATGGCAGGCTGTCCACCC | 6 | 2887 |
| 1127238 | N/A | N/A | 4887 | 4906 | TGTCTGTCCATTCGCCCATG | 78 | 2888 |
| 1127270 | N/A | N/A | 5405 | 5424 | CGCCCACACAATGTGCTACC | 10 | 2889 |
| 1127302 | N/A | N/A | 5781 | 5800 | CCTGCCGCCTGATGGCTTTC | 18 | 2890 |
| 1127334 | N/A | N/A | 5927 | 5946 | GGAAGCGACTGGGCTGTTCT | 72 | 2891 |
| 1127366 | N/A | N/A | 6202 | 6221 | TTCTAGCCACTGCCGTGTTT | 51 | 2892 |
| 1127398 | N/A | N/A | 7224 | 7243 | GCACAAGGTATCACATCCCG | 93 | 2893 |
| 1127430 | N/A | N/A | 8376 | 8395 | TTGCAATATTTTCCGTGCCC | 91 | 2894 |
| 1127462 | N/A | N/A | 8830 | 8849 | TGTAGTTTCAGGTATGGGTG | 70 | 2895 |
| 1127494 | N/A | N/A | 8965 | 8984 | GCATCGAGAGTAGAGCCTGG | 68 | 2896 |
| 1127526 | N/A | N/A | 9054 | 9073 | CCTAGAATTCCTCGGGCAAG | 31 | 2897 |
| 1127558 | N/A | N/A | 9605 | 9624 | TCAAGGGTACGCTGTCTGCA | 46 | 2898 |
| 1127590 | N/A | N/A | 9689 | 9708 | TCTAAGTCCTGGCAGGGTTA | 40 | 2899 |
| 1127622 | N/A | N/A | 9815 | 9834 | TGCAGCAATCCCAACCGGAC | 24 | 2900 |
| 1127654 | N/A | N/A | 9906 | 9925 | TGGGAAAAGAATCGGCAATC | 31 | 2901 |
| 1127686 | N/A | N/A | 10181 | 10200 | GTTTTCCTGGCATACTCGCA | 50 | 2902 |
| 1127718 | N/A | N/A | 11034 | 11053 | GCTAACATAAAGTGTTCTGG | 44 | 2903 |
| 1127750 | N/A | N/A | 12119 | 12138 | CCTCCAGAGTATATAGTCAG | 50 | 2904 |
| 1127782 | N/A | N/A | 12342 | 12361 | AGAGCTAACCAGTCAAAGGC | 76 | 2905 |
| 1127814 | N/A | N/A | 12611 | 12630 | TATAAGTCTCCTCAGCTACT | 34 | 2906 |
| 1127846 | N/A | N/A | 13322 | 13341 | CTAGATGGTTAGGCTCCCAA | 50 | 2907 |
| 1127878 | N/A | N/A | 13509 | 13528 | GGATGTCTTAGGTAATACAG | 54 | 2908 |
| 1127910 | N/A | N/A | 13786 | 13805 | CTCCCTAGTTATAAACTGCT | 24 | 2909 |
| 1127942 | N/A | N/A | 14362 | 14381 | TGCTCGCTGCCGTTCACCTG | 21 | 2910 |
| 1127954 | N/A | N/A | 15654 | 15673 | CCGTCTACAGGATTTTCTAG | 95 | 83 |
| 1127975 | N/A | N/A | 15711 | 15730 | TCCTGACAACCCCGTCTCAT | 24 | 2911 |
| 1128007 | N/A | N/A | 16754 | 16773 | GCTAGCAGTGTCACACAACA | 46 | 2912 |
| 1128039 | N/A | N/A | 16926 | 16945 | TTTGCGATGAGGACCCAATG | 81 | 2913 |
| 1128071 | N/A | N/A | 17219 | 17238 | CTCTGGCTGGTAATTGGCCA | 2 | 2914 |
| 1128103 | N/A | N/A | 18074 | 18093 | GAGGTCCAATCCATACCTGC | 24 | 2915 |
| 1128135 | N/A | N/A | 18257 | 18276 | CCTAAGTGCCTCGCCTCCAG | 22 | 2916 |
| 1128167 | N/A | N/A | 19346 | 19365 | GCCCGATAAAACTACCACTC | 29 | 2917 |
| 1128199 | N/A | N/A | 19555 | 19574 | CTAGACTCAATAGAATGACG | 41 | 2918 |
| 1128231 | N/A | N/A | 19706 | 19725 | GAAATGGCTCCCCAATGTAG | 26 | 2919 |
| 1128263 | N/A | N/A | 19842 | 19861 | CAACTCCCAGCATCCCGATG | 4 | 2920 |
| 1128295 | N/A | N/A | 21097 | 21116 | TTCCCACTAGTACAACCTGT | 29 | 2921 |
| 1128327 | N/A | N/A | 21537 | 21556 | ATGTGTTTGGCAGGACCAAT | 12 | 2922 |
| 1128359 | N/A | N/A | 21809 | 21828 | GGATGCCATGACCACGCTGT | 33 | 2923 |
| 1128391 | N/A | N/A | 21913 | 21932 | GCGCTGTAGCAGAACAGGTG | 31 | 2924 |
| 1128423 | N/A | N/A | 22080 | 22099 | CTTGGCCACACTCGGCTGTA | 12 | 2925 |
| 1128455 | N/A | N/A | 22630 | 22649 | ACAGACTAGTACTATCTATC | 40 | 2926 |
| 1128487 | N/A | N/A | 24646 | 24665 | GCCAAGGTCCATCATTCTAC | 69 | 2927 |
| 1128519 | N/A | N/A | 24744 | 24763 | CCAAGATGCGGGAAAGTCCA | 21 | 2928 |
| 1128551 | N/A | N/A | 24924 | 24943 | CCCTCATCGCCTACCGTCTT | 15 | 2929 |
| 1128583 | N/A | N/A | 25189 | 25208 | CTCTCCCAGCGGCCCGAGAG | 5 | 2930 |
| 1128615 | N/A | N/A | 25563 | 25582 | GGCCTGGTTCATTGCTTAAA | 14 | 2931 |
| 1128647 | N/A | N/A | 25924 | 25943 | GGGCCGAATTCTCAAGTGAG | 11 | 2932 |
| 1128679 | N/A | N/A | 26245 | 26264 | TTAGCTCCTGGCTAAGCAGA | 22 | 2933 |
| 1128711 | N/A | N/A | 26388 | 26407 | GTAGCGGTACCCCTGGGCCT | 24 | 2934 |

### Example 3: Effect of % Modified Oligonucleotides on Human GYS RNA In Vitro, Multiple Doses

[0613] Modified oligonucleotides selected from the examples above were tested at various doses in A431 cells. Cultured A431 cells at a density of 10,000 cells per well were treated using free uptake with various concentrations of modified oligonucleotide as specified in the tables below. After a treatment period of approximately 48 hours, total RNA was isolated from the cells and GYS1 RNA levels were measured by quantitative real-time RTPCR. Human GYS1 primer probe set RTS36346 was used to measure RNA levels, as described above. GYS1 RNA levels were normalized to total RNA content, as measured by RIBOGREEN®. Results are presented as percent reduction of GYS1 RNA relative to the amount of GYS1 RNA in untreated control cells (% reduction). As used herein, a value of ‘0’ indicates that treatment with the modified oligonucleotide did not inhibit GYS1 mRNA levels. Each table represents results from an individual assay plate. The half maximal inhibitory concentration (IC₅₀) of each modified oligonucleotide was calculated using a linear regression on a log/linear plot of the data in Excel. Modified oligonucleotides marked with a (†) symbol indicate that the modified oligonucleotide is complementary to the amplicon region of the primer probe set.

TABLE 40
Dose-dependent reduction of human GYS1 RNA
in A431 cells by modified oligonucleotides

| Compound | % Reduction | | | | |
|---|---|---|---|---|---|
| Number | 94 nM | 375 nM | 1500 nM | 6000 nM | IC₅₀ μM |
| 941366 | 16 | 23 | 41 | 50 | 5.7 |
| 941367 | 1 | 22 | 50 | 69 | 1.8 |
| 941452 | 12 | 29 | 51 | 67 | 1.6 |
| 941459 | 13 | 38 | 56 | 79 | 0.9 |
| 941553 | 59 | 78 | 88 | 88 | <0.1 |
| 941554 | 21 | 43 | 61 | 76 | 0.7 |
| 941555 | 14 | 37 | 57 | 70 | 1.1 |
| 941573 | 0 | 15 | 20 | 41 | >6.0 |
| 941583 | 17 | 21 | 44 | 61 | 2.6 |
| 941596 | 15 | 29 | 49 | 66 | 1.7 |
| 941597 | 36 | 58 | 77 | 85 | 0.2 |
| 941615 | 49 | 71 | 85 | 91 | <0.1 |
| 941637 | 24 | 53 | 81 | 90 | 0.4 |
| 941651 | 0 | 30 | 49 | 69 | 1.7 |
| 941667 | 3 | 15 | 41 | 57 | 3.5 |
| 941715 | 50 | 80 | 92 | 96 | <0.1 |
| 941717 | 0 | 25 | 51 | 72 | 1.6 |
| 941721 | 8 | 13 | 34 | 51 | >6.0 |
| 941722 | 25 | 59 | 83 | 91 | 0.3 |

TABLE 41
Dose-dependent reduction of human GYS1 RNA
in A431 cells by modified oligonucleotides

| Compound | % Reduction | | | | |
|---|---|---|---|---|---|
| Number | 94 nM | 375 nM | 1500 nM | 6000 nM | IC₅₀ μM |
| 941358 | 8 | 33 | 54 | 71 | 1.3 |
| 941370 | 0 | 11 | 41 | 63 | 2.8 |
| 941405 | 0 | 14 | 38 | 68 | 2.5 |
| 941466 | 0 | 15 | 38 | 54 | 4.3 |
| 941484 | 0 | 8 | 21 | 39 | >6.0 |
| 941485 | 16 | 30 | 48 | 60 | 2.1 |
| 941563 | 44 | 59 | 80 | 89 | 0.2 |
| 941574 | 0 | 12 | 31 | 57 | 4.4 |
| 941605 | 49 | 70 | 86 | 94 | <0.1 |
| 941611 | 38 | 54 | 71 | 84 | 0.3 |
| 941617 | 0 | 0 | 0 | 12 | >6.0 |
| 941634 | 6 | 9 | 25 | 41 | >6.0 |
| 941635 | 19 | 38 | 56 | 69 | 1.1 |
| 941652 | 7 | 26 | 58 | 75 | 1.3 |
| 941653 | 10 | 33 | 63 | 78 | 0.9 |
| 941715 | 44 | 80 | 93 | 96 | <0.1 |
| 941718 | 46 | 68 | 85 | 92 | 0.1 |
| 941724 | 1 | 0 | 0 | 0 | >6.0 |
| 941772 | 1 | 6 | 1 | 10 | >6.0 |

TABLE 42
Dose-dependent reduction of human GYS1 RNA
in A431 cells by modified oligonucleotides

| Compound | % Reduction | | | | |
|---|---|---|---|---|---|
| Number | 94 nM | 375 nM | 1500 nM | 6000 nM | IC₅₀ μM |
| 941359 | 32 | 54 | 77 | 90 | 0.3 |
| 941371 | 16 | 33 | 53 | 66 | 1.4 |
| 941378 | 8 | 25 | 47 | 59 | 2.5 |
| 941437 | 0 | 12 | 39 | 51 | 4.5 |
| 941438 | 20 | 37 | 59 | 75 | 0.9 |
| 941450 | 13 | 32 | 49 | 69 | 1.5 |
| 941462 | 8 | 20 | 23 | 33 | >6.0 |
| 941558 | 12 | 23 | 41 | 51 | 4.8 |
| 941581 | 0 | 9 | 14 | 44 | >6.0 |
| 941588 | 32 | 55 | 61 | 67 | 0.5 |
| 941612 | 24 | 45 | 61 | 76 | 0.7 |
| 941629 | 15 | 26 | 45 | 54 | 3.4 |
| 941630 | 44 | 68 | 84 | 89 | 0.1 |
| 941636 | 10 | 29 | 49 | 64 | 1.9 |
| 941648 | 0 | 24 | 51 | 71 | 1.7 |
| 941654 | 17 | 39 | 56 | 74 | 1.0 |
| 941714 | 27 | 44 | 62 | 78 | 0.6 |
| 941715 | 55 | 81 | 89 | 94 | <0.1 |
| 941726 | 26 | 55 | 78 | 89 | 0.3 |

TABLE 43
Dose-dependent reduction of human GYS1 RNA
in A431 cells by modified oligonucleotides

| Compound | % Reduction | | | | |
|---|---|---|---|---|---|
| Number | 63 nM | 250 nM | 1000 nM | 4000 nM | IC₅₀ μM |
| 1126888 | 50 | 74 | 80 | 84 | <0.1 |
| 1126889 | 13 | 54 | 73 | 80 | 0.4 |
| 1127015 | 36 | 59 | 79 | 85 | 0.2 |
| 1127016 | 27 | 40 | 68 | 79 | 0.4 |
| 1127017 | 33 | 52 | 75 | 87 | 0.2 |
| 1127113 | 48 | 68 | 83 | 90 | <0.1 |
| 1127241 | 11 | 51 | 74 | 84 | 0.4 |
| 1127335 | 13 | 39 | 64 | 76 | 0.6 |
| 1127369 | 32 | 55 | 71 | 85 | 0.2 |
| 1127399 | 37 | 57 | 77 | 85 | 0.2 |
| 1127431 | 25 | 52 | 74 | 86 | 0.3 |
| 1127432 | 50 | 80 | 91 | 96 | <0.1 |
| 1127433 | 50 | 74 | 90 | 94 | <0.1 |
| 1127463 | 30 | 61 | 78 | 84 | 0.2 |
| 1127464 | 47 | 69 | 85 | 92 | <0.1 |
| 1127879 | 24 | 48 | 71 | 80 | 0.3 |
| 1127954 | 40 | 76 | 91 | 95 | 0.1 |
| 1128009 | 36 | 49 | 68 | 78 | 0.2 |
| 1128040 | 27 | 54 | 78 | 91 | 0.2 |

TABLE 44
Dose-dependent reduction of human GYS1 RNA
in A431 cells by modified oligonucleotides

| Compound | % Reduction | | | | |
|---|---|---|---|---|---|
| Number | 63 nM | 250 nM | 1000 nM | 4000 nM | IC₅₀ μM |
| 1126795 | 26 | 42 | 62 | 69 | 0.5 |
| 1127018 | 16 | 40 | 50 | 71 | 0.8 |
| 1127019 | 39 | 58 | 74 | 82 | 0.1 |
| 1127020 | 10 | 43 | 63 | 71 | 0.6 |
| 1127084 | 20 | 54 | 74 | 88 | 0.3 |
| 1127114 | 29 | 53 | 78 | 89 | 0.2 |
| 1127402 | 27 | 58 | 75 | 87 | 0.2 |
| 1127403 | 35 | 46 | 67 | 78 | 0.3 |
| 1127434 | 26 | 46 | 70 | 81 | 0.3 |
| 1127466 | 87 | 95 | 97 | 97 | <0.1 |
| 1127467 | 47 | 76 | 87 | 91 | <0.1 |
| 1127498 | 36 | 72 | 83 | 89 | 0.1 |
| 1127499 | 48 | 72 | 84 | 90 | <0.1 |
| 1127882 | 36 | 56 | 73 | 80 | 0.2 |
| 1127954 | 36 | 75 | 90 | 95 | 0.1 |
| 1127979 | 49 | 76 | 89 | 94 | <0.1 |
| 1127980 | 36 | 60 | 83 | 88 | 0.1 |
| 1127981 | 53 | 76 | 90 | 95 | <0.1 |
| 1127982 | 41 | 77 | 90 | 95 | 0.1 |

TABLE 45
Dose-dependent reduction of human GYS1 RNA
in A431 cells by modified oligonucleotides

| Compound | % Reduction | | | | |
|---|---|---|---|---|---|
| Number | 63 nM | 250 nM | 1000 nM | 4000 nM | IC₅₀ μM |
| 1126896 | 37 | 57 | 72 | 77 | 0.2 |
| 1126993 | 12 | 48 | 76 | 79 | 0.4 |
| 1127055 | 23 | 35 | 63 | 75 | 0.5 |
| 1127085 | 10 | 11 | 41 | 65 | 1.8 |
| 1127215 | 11 | 25 | 59 | 66 | 1.0 |
| 1127217 | 20 | 39 | 64 | 81 | 0.5 |
| 1127248 | 33 | 48 | 66 | 77 | 0.3 |
| 1127249 | 38 | 56 | 80 | 88 | 0.1 |
| 1127344 | 27 | 44 | 67 | 76 | 0.4 |
| 1127409 | 27 | 45 | 74 | 83 | 0.3 |
| 1127535 | 33 | 58 | 82 | 88 | 0.2 |
| 1127952 | 22 | 48 | 68 | 82 | 0.4 |
| 1127953 | 19 | 57 | 75 | 83 | 0.3 |
| 1127954 | 35 | 76 | 90 | 95 | 0.1 |
| 1127983 | 27 | 64 | 81 | 88 | 0.2 |
| 1128015 | 28 | 36 | 56 | 62 | 0.8 |
| 1128016 | 45 | 70 | 83 | 90 | 0.1 |
| 1128017 | 19 | 52 | 79 | 88 | 0.3 |
| 1128018 | 43 | 75 | 91 | 96 | <0.1 |

TABLE 46
Dose-dependent reduction of human GYS1 RNA
in A431 cells by modified oligonucleotides

| Compound | % Reduction | | | | |
|---|---|---|---|---|---|
| Number | 63 nM | 250 nM | 1000 nM | 4000 nM | IC₅₀ μM |
| 1126803 | 39 | 61 | 81 | 88 | 0.1 |
| 1126899 | 56 | 78 | 89 | 91 | <0.1 |
| 1126900 | 27 | 65 | 83 | 88 | 0.2 |
| 1126931 | 43 | 65 | 80 | 86 | 0.1 |
| 1127251 | 39 | 67 | 84 | 89 | 0.1 |
| 1127313 | 7 | 35 | 50 | 52 | 1.8 |
| 1127410 | 46 | 73 | 89 | 95 | <0.1 |
| 1127411 | 19 | 44 | 73 | 86 | 0.4 |
| 1127506 | 20 | 41 | 66 | 80 | 0.4 |
| 1127507 | 22 | 50 | 75 | 85 | 0.3 |
| 1127538 | 6 | 38 | 62 | 71 | 0.7 |
| 1127603 | 41 | 73 | 88 | 95 | 0.1 |
| 1127954 | 36 | 78 | 92 | 95 | 0.1 |
| 1127955 | 32 | 48 | 72 | 83 | 0.3 |
| 1128019 | 30 | 63 | 82 | 87 | 0.2 |
| 1128021 | 34 | 74 | 89 | 94 | 0.1 |
| 1128051 | 52 | 76 | 86 | 91 | <0.1 |
| 1128052 | 6 | 37 | 62 | 76 | 0.7 |
| 1128275 | 37 | 44 | 70 | 67 | 0.3 |

TABLE 47
Dose-dependent reduction of human GYS1 RNA
in A431 cells by modified oligonucleotides

| Compound | % Reduction | | | | |
|---|---|---|---|---|---|
| Number | 63 nM | 250 nM | 1000 nM | 4000 nM | IC₅₀ μM |
| 1126292 | 0 | 29 | 59 | 78 | 0.8 |
| 1126293 | 6 | 27 | 49 | 77 | 0.9 |
| 1126901 | 24 | 43 | 72 | 81 | 0.4 |
| 1126902 | 29 | 54 | 77 | 82 | 0.2 |
| 1126996 | 32 | 50 | 67 | 72 | 0.3 |
| 1126997 | 28 | 47 | 68 | 74 | 0.3 |
| 1126998 | 28 | 49 | 68 | 83 | 0.3 |
| 1127093 | 9 | 35 | 68 | 79 | 0.6 |
| 1127094 | 5 | 41 | 65 | 79 | 0.6 |
| 1127252 | 19 | 42 | 69 | 80 | 0.4 |
| 1127253 | 21 | 35 | 59 | 71 | 0.7 |
| 1127286 | 8 | 36 | 62 | 67 | 0.8 |
| 1127413 | 8 | 28 | 59 | 71 | 0.9 |
| 1127414 | 38 | 63 | 84 | 92 | 0.1 |
| 1127444 | 20 | 54 | 69 | 75 | 0.4 |
| 1127604 | 13 | 32 | 51 | 57 | 1.5 |
| 1127669 | 37 | 53 | 66 | 76 | 0.2 |
| 1127954 | 48 | 80 | 91 | 95 | <0.1 |
| 1128278 | 33 | 49 | 70 | 79 | 0.3 |

TABLE 48
Dose-dependent reduction of human GYS1 RNA
in A431 cells by modified oligonucleotides

| Compound | % Reduction | | | | |
|---|---|---|---|---|---|
| Number | 63 nM | 250 nM | 1000 nM | 4000 nM | IC₅₀ μM |
| 1126775 | 48 | 74 | 84 | 87 | <0.1 |
| 1126776 | 48 | 71 | 83 | 88 | <0.1 |
| 1126777 | 41 | 65 | 78 | 84 | 0.1 |
| 1126778 | 5 | 39 | 62 | 77 | 0.6 |
| 1126999 | 32 | 39 | 73 | 81 | 0.3 |
| 1127000 | 19 | 45 | 68 | 77 | 0.4 |
| 1127001 | 47 | 66 | 80 | 88 | 0.1 |
| 1127096 | 9 | 35 | 60 | 71 | 0.8 |
| 1127291 | 21 | 53 | 74 | 84 | 0.3 |
| 1127384 | 0 | 24 | 46 | 70 | 1.3 |
| 1127385 | 24 | 46 | 73 | 87 | 0.3 |
| 1127954 | 47 | 80 | 92 | 96 | <0.1 |
| 1127960 | 31 | 62 | 83 | 92 | 0.2 |
| 1127961 | 36 | 42 | 67 | 81 | 0.3 |
| 1127962 | 49 | 72 | 88 | 95 | <0.1 |
| 1127963 | 21 | 48 | 81 | 92 | 0.3 |
| 1127993 | 16 | 45 | 64 | 73 | 0.5 |
| 1128027 | 37 | 65 | 83 | 90 | 0.1 |
| 1128028 | 32 | 70 | 84 | 91 | 0.1 |

TABLE 49
Dose-dependent reduction of human GYS1 RNA
in A431 cells by modified oligonucleotides

| Compound | % Reduction | | | | |
|---|---|---|---|---|---|
| Number | 63 nM | 250 nM | 1000 nM | 4000 nM | IC₅₀ μM |
| 1126331 | 0 | 20 | 53 | 63 | 1.4 |
| 1127036 | 28 | 57 | 78 | 87 | 0.2 |
| 1127037 | 33 | 47 | 68 | 78 | 0.3 |
| 1127038 | 29 | 52 | 73 | 84 | 0.3 |
| 1127039 | 57 | 80 | 90 | 94 | <0.1 |
| 1127040 | 53 | 81 | 90 | 94 | <0.1 |
| 1127102 | 37 | 46 | 66 | 78 | 0.3 |
| 1127260 | 21 | 42 | 73 | 78 | 0.4 |
| 1127261 | 34 | 60 | 79 | 86 | 0.2 |
| 1127292 | 23 | 35 | 59 | 69 | 0.7 |
| 1127357 | 23 | 52 | 70 | 84 | 0.3 |
| 1127358 | 31 | 61 | 81 | 89 | 0.2 |
| 1127391 | 33 | 44 | 63 | 80 | 0.3 |
| 1127420 | 24 | 46 | 67 | 72 | 0.4 |
| 1127579 | 3 | 7 | 48 | 77 | 1.2 |
| 1127582 | 40 | 64 | 76 | 83 | 0.1 |
| 1127954 | 58 | 84 | 92 | 96 | <0.1 |
| 1127964 | 29 | 55 | 71 | 70 | 0.3 |
| 1128032 | 18 | 40 | 64 | 81 | 0.5 |

TABLE 50
Dose-dependent reduction of human GYS1 RNA
in A431 cells by modified oligonucleotides

| Compound | % Reduction | | | | |
|---|---|---|---|---|---|
| Number | 63 nM | 250 nM | 1000 nM | 4000 nM | IC₅₀ μM |
| 1126433 | 0 | 0 | 13 | 12 | >4.0 |
| 1126784 | 13 | 45 | 63 | 76 | 0.5 |
| 1126850 | 24 | 46 | 63 | 72 | 0.5 |
| 1127041 | 24 | 53 | 68 | 77 | 0.3 |
| 1127042 | 48 | 67 | 84 | 89 | <0.1 |
| 1127299 | 40 | 63 | 85 | 92 | 0.1 |
| 1127329 | 42 | 62 | 76 | 81 | 0.1 |
| 1127330 | 28 | 62 | 76 | 86 | 0.2 |
| 1127331 | 44 | 62 | 78 | 82 | 0.1 |
| 1127363 | 22 | 49 | 71 | 81 | 0.3 |
| 1127426 | 31 | 47 | 59 | 72 | 0.4 |
| 1127428 | 48 | 75 | 89 | 95 | <0.1 |
| 1127954 | 53 | 80 | 92 | 96 | <0.1 |
| 1128004 | 34 | 60 | 81 | 89 | 0.2 |
| 1128033 | 20 | 43 | 65 | 74 | 0.5 |
| 1128035 | 18 | 43 | 67 | 82 | 0.4 |
| 1128036 | 44 | 71 | 90 | 95 | 0.1 |
| 1128483 | 31 | 49 | 63 | 70 | 0.4 |
| 1128609 | 27 | 48 | 68 | 75 | 0.3 |

TABLE 51
Dose-dependent reduction of human GYS1 RNA
in A431 cells by modified oligonucleotides

| Compound | % Reduction | | | | |
|---|---|---|---|---|---|
| Number | 63 nM | 250 nM | 1000 nM | 4000 nM | IC₅₀ μM |
| 1126788 | 23 | 30 | 58 | 66 | 0.8 |
| 1126789 | 48 | 67 | 82 | 79 | <0.1 |
| 1126790 | 24 | 36 | 62 | 75 | 0.5 |
| 1126820 | 21 | 30 | 57 | 63 | 1.0 |
| 1126884 | 5 | 32 | 64 | 67 | 0.8 |
| 1126885 | 22 | 39 | 60 | 70 | 0.6 |
| 1126886 | 0 | 37 | 66 | 81 | 0.7 |
| 1127013 | 8 | 37 | 63 | 75 | 0.6 |
| 1127014 | 22 | 45 | 65 | 79 | 0.4 |
| 1127172 | 6 | 15 | 44 | 50 | 3.1 |
| 1127174 | 29 | 53 | 80 | 86 | 0.2 |
| 1127332 | 28 | 42 | 59 | 59 | 0.7 |
| 1127398 | 42 | 65 | 81 | 90 | 0.1 |
| 1127429 | 15 | 50 | 71 | 79 | 0.4 |
| 1127430 | 50 | 61 | 78 | 85 | <0.1 |
| 1127954 | 45 | 78 | 92 | 96 | <0.1 |
| 1128037 | 0 | 35 | 61 | 75 | 0.8 |
| 1128038 | 34 | 53 | 75 | 82 | 0.2 |
| 1128039 | 9 | 51 | 71 | 77 | 0.4 |

### Example 4: Design of Modified Oligonucleotides Complementary to a GYS1 Nucleic Acid

[0614] Modified oligonucleotides were designed as indicated in the tables below.

[0615] The compounds in Table 52 are 5-10-5 MOE gapmers. The gapmers are 20 nucleosides in length, wherein the central gap segment consists of ten nucleosides comprising 2′-β-D-deoxyribosyl sugar moieties, the 5′ wing segment consists of five nucleosides comprising 2′-MOE modified sugar moieties, and the 3′ wing segment consists of five nucleosides comprising 2′-MOE modified sugar moieties. The sugar motif of the gapmers is (from 5′ to 3′): eeeeeddddddddddeeeee; wherein ‘d’ represents a 2′-β-D-deoxyribosyl sugar moiety, and ‘e’ represents a 2′-O(CH₂)₂OCH₃ ribosyl sugar moiety. The gapmers have an internucleoside linkage motif of (from 5′ to 3′): soooossssssssssooss; wherein “s” represents a phosphorothioate internucleoside linkage and “o” represents a phosphodiester internucleoside linkage. All cytosine residues are 5-methylcytosines.

[0616] “Start site” indicates the 5′-most nucleoside of the target sequence to which the modified oligonucleotide is complementary. “Stop site” indicates the 3′-most nucleoside of the target sequence to which the modified oligonucleotide is complementary. The modified oligonucleotide listed in the Tables below are 100% complementary to either SEQ ID NO: 1 (described herein above), or SEQ ID NO: 2 (described herein above). ‘N/A’ indicates that the modified oligonucleotide is not 100% complementary to that particular target nucleic acid sequence.

TABLE 52
5-10-5 MOE gapmers complementary to human GYS1

| | SEQ | SEQ | SEQ ID | SEQ ID | | |
|---|---|---|---|---|---|---|
| | ID NO: | ID NO: | NO: 2 | NO: 2 | | |
| Compound | 1 Start | 1 Stop | Start | Stop | | SEQ |
| Number | Site | Site | Site | Site | Sequence (5′ to 3′) | ID No. |
| 648138 | 290 | 309 | 2937 | 2956 | TCGAATTCATCCTCCCAGTC | 1939 |
| 648146 | 356 | 375 | N/A | N/A | GTGTAGATGCCACCCACCTT | 2935 |
| 648374 | N/A | N/A | 3639 | 3658 | CTCCCATCCTAGGGCCCAGC | 2936 |
| 648378 | N/A | N/A | 4509 | 4528 | GATGCCACCCACTGTGGGCC | 2937 |
| 648408 | N/A | N/A | 16869 | 16888 | AAATGTCAGCTATTATTAGG | 2938 |
| 648409 | N/A | N/A | 16872 | 16891 | CAGAAATGTCAGCTATTATT | 2939 |
| 648410 | N/A | N/A | 16875 | 16894 | TTCCAGAAATGTCAGCTATT | 2940 |
| 648411 | N/A | N/A | 16878 | 16897 | GCCTTCCAGAAATGTCAGCT | 2941 |
| 1251627 | N/A | N/A | 8379 | 8398 | CTGTTGCAATATTTTCCGTG | 673 |

[0617] The compound in Table 53 is a 5-10-5 MOE gapmer. The gapmer is 20 nucleosides in length, wherein the central gap segment consists of ten nucleosides comprising 2′-β-D-deoxyribosyl sugar moieties, the 5′ wing segment consists of five nucleosides comprising 2′-MOE modified sugar moieties, and the 3′ wing segment consists of five nucleosides comprising 2′-MOE modified sugar moieties. The sugar motif of the gapmer is (from 5′ to 3′): eeeeeddddddddddeeeee; wherein ‘d’ represents a 2′-β-D-deoxyribosyl sugar moiety, and ‘e’ represents a 2′-O(CH₂)₂OCH₃ ribosyl sugar moiety. The gapmer has an internucleoside linkage motif of (from 5′ to 3′): sooosssssssssssooos; wherein “s” represents a phosphorothioate internucleoside linkage and “o” represents a phosphodiester internucleoside linkage.

[0618] All cytosine residues are 5-methylcytosines. “Start site” indicates the 5′-most nucleoside of the target sequence to which the modified oligonucleotide is complementary. “Stop site” indicates the 3′-most nucleoside of the target sequence to which the modified oligonucleotide is complementary. The modified oligonucleotide listed in the Table below is 100% complementary to SEQ ID NO: 2 (described herein above). ‘N/A’ indicates that the modified oligonucleotide is not 100% complementary to that particular target nucleic acid sequence.

TABLE 53
5-10-5 MOE gapmer with complementary to human GYS1

| | SEQ | SEQ | SEQ | SEQ | | |
|---|---|---|---|---|---|---|
| | ID NO: | ID NO: | ID NO: | ID NO: | | |
| Compound | 1 Start | 1 Stop | 2 Start | 2 Stop | | SEQ |
| Number | Site | Site | Site | Site | Sequence (5′ to 3′) | ID No. |
| 1251628 | N/A | N/A | 8379 | 8398 | CTGTTGCAATATTTTCCGTG | 673 |

[0619] The compounds in Table 54 are 5-10-5 MOE gapmers. The gapmers are 20 nucleosides in length, wherein the central gap segment consists of ten nucleosides comprising 2′-β-D-deoxyribosyl sugar moieties, the 5′ wing segment consists of five nucleosides comprising 2′-MOE modified sugar moieties, and the 3′ wing segment consists of five nucleosides comprising 2′-MOE modified sugar moieties. The sugar motif of the gapmers is (from 5′ to 3′): eeeeeddddddddddeeeee; wherein ‘d’ represents a 2′-β-D-deoxyribosyl sugar moiety, and ‘e’ represents a 2′-O(CH₂)₂OCH₃ ribosyl sugar moiety. The gapmers have an internucleoside linkage motif of (from 5′ to 3′): sooosssssssssssooss; wherein “s” represents a phosphorothioate internucleoside linkage and “o” represents a phosphodiester internucleoside linkage. All cytosine residues are 5-methylcytosines.

[0620] “Start site” indicates the 5′-most nucleoside of the target sequence to which the modified oligonucleotide is complementary. “Stop site” indicates the 3′-most nucleoside of the target sequence to which the modified oligonucleotide is complementary. Each modified oligonucleotide listed in the Tables below is 100% complementary to SEQ ID NO: 1 (described herein above), or SEQ ID NO: 2 (described herein above). ‘N/A’ indicates that the modified oligonucleotide is not 100% complementary to that particular target nucleic acid sequence.

TABLE 54
5-10-5 MOE gapmers complementary to human GYS1

| | SEQ | SEQ | SEQ | SEQ | | |
|---|---|---|---|---|---|---|
| | ID | ID | ID | ID | | |
| | NO: | NO: | NO: | NO: | | |
| | 1 | 1 | 2 | 2 | | SEQ |
| Compound | Start | Stop | Start | Stop | | ID |
| Number | Site | Site | Site | Site | Sequence (5′ to 3′) | No. |
| 1251610 | N/A | N/A | 23519 | 23538 | TGCCCCTGACCTATAATTAT | 2942 |
| 1251611 | N/A | N/A | 15667 | 15686 | CCAAAAGTAAATTCCGTCTA | 2943 |
| 1251612 | N/A | N/A | 15666 | 15685 | CAAAAGTAAATTCCGTCTAC | 2944 |
| 1251613 | N/A | N/A | 15652 | 15671 | GTCTACAGGATTTTCTAGAA | 2945 |
| 1251614 | N/A | N/A | 15644 | 15663 | GATTTTCTAGAATACAAGCT | 2946 |
| 1251615 | N/A | N/A | 15658 | 15677 | AATTCCGTCTACAGGATTTT | 2947 |
| 1251616 | N/A | N/A | 15650 | 15669 | CTACAGGATTTTCTAGAATA | 2948 |
| 1251617 | N/A | N/A | 15665 | 15684 | AAAAGTAAATTCCGTCTACA | 2949 |
| 1251618 | N/A | N/A | 15670 | 15689 | TGCCCAAAAGTAAATTCCGT | 2950 |
| 1251619 | N/A | N/A | 15664 | 15683 | AAAGTAAATTCCGTCTACAG | 2951 |
| 1251620 | N/A | N/A | 15646 | 15665 | AGGATTTTCTAGAATACAAG | 2952 |
| 1251621 | N/A | N/A | 15651 | 15670 | TCTACAGGATTTTCTAGAAT | 2953 |
| 1251622 | N/A | N/A | 15657 | 15676 | ATTCCGTCTACAGGATTTTC | 2954 |
| 1251623 | N/A | N/A | 15671 | 15690 | TTGCCCAAAAGTAAATTCCG | 2955 |
| 1251624 | N/A | N/A | 15645 | 15664 | GGATTTTCTAGAATACAAGC | 2956 |
| 1270755 | N/A | N/A | 16887 | 16906 | ACATGGCAAGCCTTCCAGAA | 2957 |
| 1270756 | N/A | N/A | 16867 | 16886 | ATGTCAGCTATTATTAGGAC | 2958 |
| 1270757 | N/A | N/A | 12626 | 12645 | GTTCACAAGCACAAGTATAA | 2959 |
| 1270758 | N/A | N/A | 12597 | 12616 | GCTACTGCAAATGGCTAACA | 2960 |
| 1270759 | N/A | N/A | 16885 | 16904 | ATGGCAAGCCTTCCAGAAAT | 2961 |
| 1270760 | N/A | N/A | 12651 | 12670 | TTCTTGCCTAATATTACTTG | 2962 |
| 1270761 | N/A | N/A | 12643 | 12662 | TAATATTACTTGCTTAGGTT | 2963 |
| 1270762 | N/A | N/A | 12615 | 12634 | CAAGTATAAGTCTCCTCAGC | 2964 |
| 1270763 | N/A | N/A | 12650 | 12669 | TCTTGCCTAATATTACTTGC | 2965 |
| 1270764 | N/A | N/A | 12618 | 12637 | GCACAAGTATAAGTCTCCTC | 310 |
| 1270765 | N/A | N/A | 12610 | 12629 | ATAAGTCTCCTCAGCTACTG | 2966 |
| 1270766 | N/A | N/A | 16866 | 16885 | TGTCAGCTATTATTAGGACT | 2967 |
| 1270767 | N/A | N/A | 12628 | 12647 | AGGTTCACAAGCACAAGTAT | 2968 |
| 1270768 | N/A | N/A | 12607 | 12626 | AGTCTCCTCAGCTACTGCAA | 2969 |
| 1270769 | N/A | N/A | 16881 | 16900 | CAAGCCTTCCAGAAATGTCA | 2970 |
| 1270770 | N/A | N/A | 16883 | 16902 | GGCAAGCCTTCCAGAAATGT | 2971 |
| 1270771 | N/A | N/A | 12621 | 12640 | CAAGCACAAGTATAAGTCTC | 2972 |
| 1270772 | N/A | N/A | 12633 | 12652 | TGCTTAGGTTCACAAGCACA | 2973 |
| 1270773 | N/A | N/A | 16880 | 16899 | AAGCCTTCCAGAAATGTCAG | 2974 |
| 1270774 | N/A | N/A | 12609 | 12628 | TAAGTCTCCTCAGCTACTGC | 2975 |
| 1270775 | N/A | N/A | 12613 | 12632 | AGTATAAGTCTCCTCAGCTA | 2976 |
| 1270776 | N/A | N/A | 12653 | 12672 | CCTTCTTGCCTAATATTACT | 2977 |
| 1270777 | N/A | N/A | 12580 | 12599 | ACAGGGATCTGATCCACACT | 2978 |
| 1270778 | N/A | N/A | 16865 | 16884 | GTCAGCTATTATTAGGACTT | 2979 |
| 1270779 | N/A | N/A | 16882 | 16901 | GCAAGCCTTCCAGAAATGTC | 2980 |
| 1270780 | N/A | N/A | 12577 | 12596 | GGGATCTGATCCACACTGGT | 233 |
| 1270781 | N/A | N/A | 12599 | 12618 | CAGCTACTGCAAATGGCTAA | 2981 |
| 1270782 | N/A | N/A | 12600 | 12619 | TCAGCTACTGCAAATGGCTA | 2982 |
| 1270783 | N/A | N/A | 12591 | 12610 | GCAAATGGCTAACAGGGATC | 2983 |
| 1270784 | N/A | N/A | 12654 | 12673 | GCCTTCTTGCCTAATATTAC | 387 |
| 1270785 | N/A | N/A | 16886 | 16905 | CATGGCAAGCCTTCCAGAAA | 2984 |
| 1270786 | N/A | N/A | 12601 | 12620 | CTCAGCTACTGCAAATGGCT | 2985 |
| 1270787 | N/A | N/A | 12606 | 12625 | GTCTCCTCAGCTACTGCAAA | 2986 |
| 1270788 | N/A | N/A | 12649 | 12668 | CTTGCCTAATATTACTTGCT | 2987 |
| 1270789 | N/A | N/A | 12622 | 12641 | ACAAGCACAAGTATAAGTCT | 2988 |
| 1270790 | N/A | N/A | 12644 | 12663 | CTAATATTACTTGCTTAGGT | 2989 |
| 1270791 | N/A | N/A | 16855 | 16874 | ATTAGGACTTGTACTTGTCC | 392 |
| 1270792 | N/A | N/A | 12608 | 12627 | AAGTCTCCTCAGCTACTGCA | 2990 |
| 1270793 | N/A | N/A | 12648 | 12667 | TTGCCTAATATTACTTGCTT | 2991 |
| 1270794 | N/A | N/A | 12634 | 12653 | TTGCTTAGGTTCACAAGCAC | 2992 |
| 1270795 | N/A | N/A | 12623 | 12642 | CACAAGCACAAGTATAAGTC | 2993 |
| 1270796 | N/A | N/A | 12647 | 12666 | TGCCTAATATTACTTGCTTA | 2994 |
| 1311835 | N/A | N/A | 16879 | 16898 | AGCCTTCCAGAAATGTCAGC | 2995 |
| 1311836 | N/A | N/A | 16877 | 16896 | CCTTCCAGAAATGTCAGCTA | 2996 |
| 1311837 | N/A | N/A | 16876 | 16895 | CTTCCAGAAATGTCAGCTAT | 2997 |
| 1318941 | N/A | N/A | 10152 | 10171 | CTGCCACGGTCCCAGCTCAC | 2998 |
| 1318942 | N/A | N/A | 10145 | 10164 | GGTCCCAGCTCACGTTCTCC | 2999 |
| 1318943 | N/A | N/A | 10146 | 10165 | CGGTCCCAGCTCACGTTCTC | 3000 |
| 1318944 | N/A | N/A | 10148 | 10167 | CACGGTCCCAGCTCACGTTC | 3001 |
| 1318945 | N/A | N/A | 10149 | 10168 | CCACGGTCCCAGCTCACGTT | 3002 |
| 1318946 | N/A | N/A | 10147 | 10166 | ACGGTCCCAGCTCACGTTCT | 3003 |
| 1318948 | N/A | N/A | 10153 | 10172 | TCTGCCACGGTCCCAGCTCA | 3004 |
| 1318949 | N/A | N/A | 12655 | 12674 | TGCCTTCTTGCCTAATATTA | 3005 |
| 1318950 | N/A | N/A | 15698 | 15717 | GTCTCATATTCCAGTTCTGC | 3006 |
| 1318951 | N/A | N/A | 5761 | 5780 | TCCTTGGACAACAGCGTGCC | 3007 |
| 1318952 | N/A | N/A | 10139 | 10158 | AGCTCACGTTCTCCAGGTTG | 3008 |
| 1318953 | N/A | N/A | 5759 | 5778 | CTTGGACAACAGCGTGCCGC | 3009 |
| 1318954 | N/A | N/A | 5758 | 5777 | TTGGACAACAGCGTGCCGCC | 3010 |
| 1318955 | N/A | N/A | 10138 | 10157 | GCTCACGTTCTCCAGGTTGT | 3011 |
| 1318956 | N/A | N/A | 10143 | 10162 | TCCCAGCTCACGTTCTCCAG | 3012 |
| 1318957 | N/A | N/A | 5760 | 5779 | CCTTGGACAACAGCGTGCCG | 3013 |
| 1318958 | N/A | N/A | 5751 | 5770 | ACAGCGTGCCGCCTGATGGC | 3014 |
| 1318959 | N/A | N/A | 10140 | 10159 | CAGCTCACGTTCTCCAGGTT | 3015 |
| 1318960 | N/A | N/A | 5748 | 5767 | GCGTGCCGCCTGATGGCTTT | 3016 |
| 1318961 | N/A | N/A | 10144 | 10163 | GTCCCAGCTCACGTTCTCCA | 3017 |
| 1318962 | N/A | N/A | 5762 | 5781 | CTCCTTGGACAACAGCGTGC | 3018 |
| 1318963 | N/A | N/A | 5749 | 5768 | AGCGTGCCGCCTGATGGCTT | 3019 |
| 1318964 | N/A | N/A | 10135 | 10154 | CACGTTCTCCAGGTTGTTGT | 3020 |
| 1251609 | N/A | N/A | 5524 | 5543 | GTCTATTACTCTTGCCTGTG | 19 |
| 1318947 | N/A | N/A | 10150 | 10169 | GCCACGGTCCCAGCTCACGT | 3023 |

[0621] The compounds in Table 55 are 5-9-5 MOE gapmers. The gapmers are 19 nucleosides in length, wherein the central gap segment consists of nine nucleosides comprising 2′-β-D-deoxyribosyl sugar moieties, the 5′ wing segment consists of five nucleosides comprising 2′-MOE modified sugar moieties, and the 3′ wing segment consists of five nucleosides comprising 2′-MOE modified sugar moieties. The sugar motif of the gapmers is (from 5′ to 3′): eeeeedddddddddeeeee; wherein ‘d’ represents a 2′-β-D-deoxyribosyl sugar moiety, and ‘e’ represents a 2′-O(CH₂)₂OCH₃ ribosyl sugar moiety. The gapmers have an internucleoside linkage motif of (from 5′ to 3′): sooossssssssssooss; wherein “s” represents a phosphorothioate internucleoside linkage and “o” represents a phosphodiester internucleoside linkage. All cytosine residues are 5-methylcytosines.

[0622] “Start site” indicates the 5′-most nucleoside of the target sequence to which the modified oligonucleotide is complementary. “Stop site” indicates the 3′-most nucleoside of the target sequence to which the modified oligonucleotide is complementary. Each modified oligonucleotide listed in the Tables below is 100% complementary to SEQ ID NO: 1 (described herein above), or SEQ ID NO: 2 (described herein above). ‘N/A’ indicates that the modified oligonucleotide is not 100% complementary to that particular target nucleic acid sequence.

TABLE 55
5-9-5 MOE gapmers complementary to human GYS1

| | SEQ | SEQ | SEQ ID | SEQ ID | | |
|---|---|---|---|---|---|---|
| | ID NO: | ID NO: | NO: 2 | NO: 2 | | |
| Compound | 1 Start | 1 Stop | Start | Stop | | SEQ |
| Number | Site | Site | Site | Site | Sequence (5′ to 3′) | ID No. |
| 1251625 | N/A | N/A | 8379 | 8397 | TGTTGCAATATTTTCCGTG | 3021 |
| 1251626 | N/A | N/A | 8380 | 8398 | CTGTTGCAATATTTTCCGT | 3022 |

[0623] The compounds in Table 56 are 6-10-4 MOE gapmers. The gapmers are 20 nucleosides in length, wherein the central gap segment consists of ten nucleosides comprising 2′-β-D-deoxyribosyl sugar moieties, the 5′ wing segment consists of six nucleosides comprising 2′-MOE modified sugar moieties, and the 3′ wing segment consists of four nucleosides comprising 2′-MOE modified sugar moieties. The sugar motif of the gapmers is (from 5′ to 3′): eeeeeeddddddddddeeee; wherein ‘d’ represents a 2′-β-D-deoxyribosyl sugar moiety, and ‘e’ represents a 2′-O(CH₂)₂OCH₃ ribosyl sugar moiety. The gapmers have an internucleoside linkage motif of (from 5′ to 3′): sooooossssssssssoss; wherein “s” represents a phosphorothioate internucleoside linkage and “o” represents a phosphodiester internucleoside linkage. All cytosine residues are 5-methylcytosines.

[0624] “Start site” indicates the 5′-most nucleoside of the target sequence to which the modified oligonucleotide is complementary. “Stop site” indicates the 3′-most nucleoside of the target sequence to which the modified oligonucleotide is complementary. Each modified oligonucleotide listed in the Tables below is 100% complementary to SEQ ID NO: 1 (described herein above), or SEQ ID NO: 2 (described herein above). ‘N/A’ indicates that the modified oligonucleotide is not 100% complementary to that particular target nucleic acid sequence.

TABLE 56
6-10-4 MOE gapmers complementary to human GYS1

| | SEQ | SEQ | SEQ ID | SEQ ID | | |
|---|---|---|---|---|---|---|
| | ID NO: | ID NO: | NO: 2 | NO: 2 | | |
| Compound | 1 Start | 1 Stop | Start | Stop | | SEQ |
| Number | Site | Site | Site | Site | Sequence (5′ to 3′) | ID No. |
| 1311839 | N/A | N/A | 5743 | 5762 | CCGCCTGATGGCTTTCTCCT | 2736 |
| | | | 5777 | 5796 | | |
| 1311840 | 291 | 310 | 2938 | 2957 | GTCGAATTCATCCTCCCAGT | 2015 |
| 1311841 | 297 | 316 | 2944 | 2963 | CTCCAGGTCGAATTCATCCT | 333 |
| 1311842 | 360 | 379 | 4518 | 4537 | CACCGTGTAGATGCCACCCA | 2707 |
| 1311843 | 238 | 257 | 2885 | 2904 | TGCGGTTTAAAGGCATGGCT | 24 |
| 1311844 | 239 | 258 | 2886 | 2905 | GTGCGGTTTAAAGGCATGGC | 1176 |
| 1311845 | N/A | N/A | 4516 | 4535 | CCGTGTAGATGCCACCCACT | 2504 |
| 1311846 | N/A | N/A | 3275 | 3294 | CAGGTATCTAGTCTCTCGGA | 1654 |
| 1311847 | N/A | N/A | 4982 | 5001 | GACCAGGCTGTCTTTCGATC | 453 |
| 1311848 | N/A | N/A | 5311 | 5330 | CGCTATTAGCATGTCCATTA | 2121 |
| 1311849 | N/A | N/A | 5599 | 5618 | CCCCGATATTCCATGCTTCT | 377 |
| 1311850 | N/A | N/A | 7669 | 7688 | GATGCTAATTCCTTCCACGG | 1363 |
| 1311851 | N/A | N/A | 8374 | 8393 | GCAATATTTTCCGTGCCCCC | 2740 |
| 1311852 | N/A | N/A | 8375 | 8394 | TGCAATATTTTCCGTGCCCC | 2817 |
| 1311853 | N/A | N/A | 8376 | 8395 | TTGCAATATTTTCCGTGCCC | 2894 |
| 1311854 | N/A | N/A | 8378 | 8397 | TGTTGCAATATTTTCCGTGC | 597 |
| 1311855 | N/A | N/A | 8377 | 8396 | GTTGCAATATTTTCCGTGCC | 520 |
| 1311856 | N/A | N/A | 15656 | 15675 | TTCCGTCTACAGGATTTTCT | 1454 |
| 1311857 | N/A | N/A | 15654 | 15673 | CCGTCTACAGGATTTTCTAG | 83 |
| 1311858 | N/A | N/A | 15655 | 15674 | TCCGTCTACAGGATTTTCTA | 1380 |
| 1311859 | N/A | N/A | 7001 | 7020 | CCTGCGACCTCTTTCCTCTA | 1972 |
| 1311860 | N/A | N/A | 6987 | 7006 | CCTCTATCCATAGGCCCATT | 1819 |
| 1311861 | N/A | N/A | 6988 | 7007 | TCCTCTATCCATAGGCCCAT | 1895 |
| 1311862 | N/A | N/A | 7013 | 7032 | ACATATCTGTCACCTGCGAC | 2202 |
| 1311863 | N/A | N/A | 7012 | 7031 | CATATCTGTCACCTGCGACC | 2125 |
| 1311864 | N/A | N/A | 7014 | 7033 | CACATATCTGTCACCTGCGA | 2279 |
| 1311865 | N/A | N/A | 7217 | 7236 | GTATCACATCCCGGCTAATT | 2433 |
| 1311866 | N/A | N/A | 5746 | 5765 | GTGCCGCCTGATGGCTTTCT | 301 |
| 1311867 | N/A | N/A | 5731 | 5750 | TTTCTCCTTGGACAACAGCG | 70 |
| | | | 5765 | 5784 | | |
| 1311868 | N/A | N/A | 5747 | 5766 | CGTGCCGCCTGATGGCTTTC | 378 |
| 1311869 | N/A | N/A | 16878 | 16897 | GCCTTCCAGAAATGTCAGCT | 2941 |
| 1311870 | 289 | 308 | 2936 | 2955 | CGAATTCATCCTCCCAGTCC | 256 |
| 1311872 | 292 | 311 | 2939 | 2958 | GGTCGAATTCATCCTCCCAG | 2092 |
| 1311873 | 359 | 378 | 4517 | 4536 | ACCGTGTAGATGCCACCCAC | 2631 |
| 1311874 | N/A | N/A | 3324 | 3343 | GTTTGCACGCAGAAATCCCA | 2498 |
| 1311875 | N/A | N/A | 4509 | 4528 | GATGCCACCCACTGTGGGCC | 2937 |
| 1311876 | 356 | 375 | N/A | N/A | GTGTAGATGCCACCCACCTT | 2935 |
| 1311877 | 296 | 315 | 2943 | 2962 | TCCAGGTCGAATTCATCCTC | 2169 |
| 1311878 | 290 | 309 | 2937 | 2956 | TCGAATTCATCCTCCCAGTC | 1939 |
| 1318966 | N/A | N/A | 10138 | 10157 | GCTCACGTTCTCCAGGTTGT | 3011 |
| 1318967 | N/A | N/A | 10135 | 10154 | CACGTTCTCCAGGTTGTTGT | 3020 |
| 1318968 | N/A | N/A | 10139 | 10158 | AGCTCACGTTCTCCAGGTTG | 3008 |
| 1318969 | N/A | N/A | 10143 | 10162 | TCCCAGCTCACGTTCTCCAG | 3012 |
| 1318970 | N/A | N/A | 10144 | 10163 | GTCCCAGCTCACGTTCTCCA | 3017 |
| 1318971 | N/A | N/A | 10140 | 10159 | CAGCTCACGTTCTCCAGGTT | 3015 |
| 1318972 | N/A | N/A | 10147 | 10166 | ACGGTCCCAGCTCACGTTCT | 3003 |
| 1318973 | N/A | N/A | 10145 | 10164 | GGTCCCAGCTCACGTTCTCC | 2999 |
| 1318974 | N/A | N/A | 10150 | 10169 | GCCACGGTCCCAGCTCACGT | 3023 |
| 1318975 | N/A | N/A | 10146 | 10165 | CGGTCCCAGCTCACGTTCTC | 3000 |
| 1318976 | N/A | N/A | 10148 | 10167 | CACGGTCCCAGCTCACGTTC | 3001 |
| 1318977 | N/A | N/A | 10149 | 10168 | CCACGGTCCCAGCTCACGTT | 3002 |
| 1318978 | N/A | N/A | 10152 | 10171 | CTGCCACGGTCCCAGCTCAC | 2998 |
| 1318979 | N/A | N/A | 12654 | 12673 | GCCTTCTTGCCTAATATTAC | 387 |
| 1318980 | N/A | N/A | 12655 | 12674 | TGCCTTCTTGCCTAATATTA | 3005 |
| 1318981 | N/A | N/A | 15698 | 15717 | GTCTCATATTCCAGTTCTGC | 3006 |
| 1318982 | N/A | N/A | 10153 | 10172 | TCTGCCACGGTCCCAGCTCA | 3004 |
| 1318983 | N/A | N/A | 15699 | 15718 | CGTCTCATATTCCAGTTCTG | 2066 |
| 1318984 | N/A | N/A | 16876 | 16895 | CTTCCAGAAATGTCAGCTAT | 2997 |
| 1318985 | N/A | N/A | 16877 | 16896 | CCTTCCAGAAATGTCAGCTA | 2996 |
| 1318986 | N/A | N/A | 5762 | 5781 | CTCCTTGGACAACAGCGTGC | 3018 |
| 1318987 | N/A | N/A | 5751 | 5770 | ACAGCGTGCCGCCTGATGGC | 3014 |
| 1318988 | N/A | N/A | 5749 | 5768 | AGCGTGCCGCCTGATGGCTT | 3019 |
| 1318989 | N/A | N/A | 5758 | 5777 | TTGGACAACAGCGTGCCGCC | 3010 |
| 1318990 | N/A | N/A | 5748 | 5767 | GCGTGCCGCCTGATGGCTTT | 3016 |
| 1318991 | N/A | N/A | 5760 | 5779 | CCTTGGACAACAGCGTGCCG | 3013 |
| 1318992 | N/A | N/A | 5761 | 5780 | TCCTTGGACAACAGCGTGCC | 3007 |
| 1318993 | N/A | N/A | 5759 | 5778 | CTTGGACAACAGCGTGCCGC | 3009 |

### Example 5: Activity of Modified Oligonucleotides Complementary to Human GYS1 in Transgenic Mice

[0625] Modified oligonucleotides described above were tested in a human GYS1 transgenic mouse model FVB-Tg. The transgenic mouse was designed using the fosmid clone ABC9-43950100I15, which spans the entire genomic location of the human GYS1 gene (specifically, it spans chromosome 19 from positions 49468032 to 49508811 on assembly GRCh37.p2).

### Treatment

[0626] The GYS1 transgenic mice were divided into groups of 3-6 mice each. Each mouse received a single ICV bolus of 200 μg of modified oligonucleotide. A group of 3-4 mice received PBS as a negative control.

### RNA Analysis

[0627] Two weeks post treatment, mice were sacrificed and RNA was extracted from cortical brain tissue, and/or spinal cord for RT-PCR analysis to measure the amount of GYS1 RNA using human GYS1 primer probe set RTS36345 (forward sequence CGGCTCAACTATCTGCTCAG, designated herein as SEQ ID NO: 3024; reverse sequence GTGTCCCAAAGCTGTTTGC designated herein as SEQ ID NO: 3025; probe sequence CAACGTGGAAACCCTCAAAGGCC, designated herein as SEQ ID NO: 3026) or human GYS1 primer probe set RTS39670 (forward sequence ACTTTGTCCATGTCCTCACTG, designated herein as SEQ ID NO: 3027; reverse sequence CCTGTCACCTTCGCCTTC, designated herein as SEQ ID NO: 3028; and probe sequence ACCCACCTTGTTAGCCACCTCC, designated herein as 3029). Results are presented as percent reduction of GYS1 RNA relative to the amount of GYS1 RNA in the PBS control normalized to mouse cyclophilin A. As used herein, a value of ‘0’ indicates that treatment with the modified oligonucleotide did not inhibit GYS1 mRNA levels. Mouse cyclophilin A was amplified using primer probe set m_cyclo24 (forward sequence TCGCCGCTTGCTGCA, designated herein as SEQ ID NO: 3030; reverse sequence ATCGGCCGTGATGTCGA, designated herein as SEQ ID NO: 3031; probe sequence CCATGGTCAACCCCACCGTGTTC, designated herein as SEQ ID NO: 3032.

[0628] As shown in the tables below, treatment with modified oligonucleotides resulted in reduction of GYS1 RNA in comparison to the amount of GYS1 RNA in the PBS control (control designated as 0% reduction). Each table represents an individual study.

TABLE 57
Reduction of human GYS1 RNA in transgenic
mice compared to PBS control

| | |
|---|---|
| | GYS1 RNA |
| Compound | (% reduction) |

| Number | Cortex | Spinal Cord |
|---|---|---|
| 941359 | 38 | 73 |
| 941597 | 2 | 42 |
| 941630 | 73 | 88 |
| 941694 | 72 | 73 |
| 941714 | 47 | 50 |
| 941718 | 64 | 67 |
| 941726 | 39 | 57 |
| 1126789 | 27 | 52 |
| 1127039 | 50 | 61 |
| 1127299 | 72 | 84 |
| 1127432 | 89 | 86 |
| 1127433 | 81 | 72 |
| 1127603 | 37 | 64 |
| 1127962 | 83 | 75 |
| 1127963 | 72 | 74 |
| 1127979 | 72 | 65 |
| 1127982 | 70 | 81 |
| 1128018 | 63 | 63 |

TABLE 58
Reduction of human GYS1 RNA in transgenic
mice compared to PBS control

| | |
|---|---|
| | GYS1 RNA |
| Compound | (% reduction) |

| Number | Cortex | Spinal Cord |
|---|---|---|
| 941371 | 54 | 51 |
| 941438 | 69 | 30 |
| 941612 | 75 | 70 |
| 941686 | 44 | 69 |
| 1126433 | 60 | 48 |
| 1126450 | 34 | 16 |
| 1126452 | 32 | 32 |
| 1126458 | 20 | 28 |
| 1126464 | 9 | 31 |
| 1126775 | 45 | 47 |
| 1126888 | 34 | 22 |
| 1127040 | 64 | 52 |
| 1127084 | 38 | 0 |

TABLE 59
Reduction of human GYS1 RNA in transgenic
mice compared to PBS control

| | |
|---|---|
| | GYS1 RNA |
| Compound | (% reduction) |

| Number | Cortex | Spinal Cord |
|---|---|---|
| 1127114 | 64 | 52 |
| 1127174 | 34 | 36 |
| 1127251 | 78 | 78 |
| 1127331 | 72 | 48 |
| 1127358 | 57 | 69 |
| 1127467 | 54 | 48 |
| 1127507 | 15 | 29 |
| 1127728 | 42 | 46 |
| 1127789 | 26 | 52 |
| 1127954 | 84 | 83 |
| 1128017 | 43 | 68 |
| 1128027 | 79 | 55 |
| 1128051 | 37 | 38 |

TABLE 60
Reduction of human GYS1 RNA in transgenic
mice compared to PBS control

| | |
|---|---|
| | GYS1 RNA |
| Compound | (% reduction) |

| Number | Cortex | Spinal Cord |
|---|---|---|
| 648411 | 80 | 85 |
| 941366 | 72 | 83 |
| 941367 | 72 | 72 |
| 941554 | 0 | 32 |
| 941637 | 73 | 84 |
| 941695 | 82 | 85 |
| 1126456 | 42 | 76 |
| 1126457 | 55 | 57 |
| 1126460 | 0 | 22 |
| 1126466 | 38 | 45 |
| 1126788 | 0 | 8 |
| 1126790 | 0 | 34 |
| 1126884 | 0 | 18 |
| 1126886 | 0 | 26 |
| 1126898 | 0 | 20 |
| 1126901 | 0 | 0 |
| 1126993 | 28 | 59 |
| 1127016 | 32 | 43 |
| 1127041 | 26 | 71 |
| 1127054 | 30 | 75 |
| 1127055 | 20 | 61 |
| 1127057 | 50 | 66 |
| 1127096 | 68 | 69 |
| 1127155 | 34 | 59 |
| 1127246 | 0‡ | 50 |
| 1128040 | 14 | 22 |
| 1128052 | 0 | 32 |
| 1128275 | 10 | 38 |
| 1127954 | 74‡ | 83‡ |

‡Indicates that fewer than 3 samples were available

TABLE 61
Reduction of human GYS1 RNA in transgenic
mice compared to PBS control

| | |
|---|---|
| | GYS1 RNA |
| Compound | (% reduction) |

| Number | Cortex | Spinal Cord |
|---|---|---|
| 1127249 | 80 | 73 |
| 1127252 | 55 | 61 |
| 1127261 | 70 | 70 |
| 1127344 | 54 | 60 |
| 1127357 | 61 | 75 |
| 1127398 | 56 | 76 |
| 1127409 | 46 | 36 |
| 1127410 | 61‡ | 83‡ |
| 1127429 | 94 | 90 |
| 1127430 | 76‡ | 90‡ |
| 1127431 | 91‡ | 88‡ |
| 1127463 | 37 | 38 |
| 1127506 | 46 | 38 |
| 1127535 | 62 | 60 |
| 1127579 | 11 | 10 |
| 1127711 | 63 | 68 |
| 1127720 | 60 | 41 |
| 1127721 | 49 | 44 |
| 1127788 | 53 | 34 |
| 1127822 | 20 | 37 |
| 1127823 | 47 | 50 |
| 1127952 | 58‡ | 65‡ |
| 1127960 | 67‡ | 60‡ |
| 1127981 | 69 | 77 |
| 1128016 | 81‡ | 70‡ |

‡Indicates that fewer than 3 samples were available

TABLE 62
Reduction of human GYS1 RNA in transgenic
mice compared to PBS control

| | |
|---|---|
| | GYS1 RNA |
| Compound | (% reduction) |

| Number | Cortex | Spinal Cord |
|---|---|---|
| 941563 | 38 | 43 |
| 1126465 | 55‡ | 52‡ |
| 1126778 | 12 | 25 |
| 1126788 | 49 | 41 |
| 1126790 | 22 | 36 |
| 1126884 | 19‡ | 10‡ |
| 1126996 | 68‡ | 57‡ |
| 1127036 | 41 | 24 |
| 1127181 | 50‡ | 30‡ |
| 1127248 | 59 | 48 |
| 1127291 | 61 | 70 |
| 1127363 | 60 | 47 |
| 1127399 | 50 | 70 |
| 1127993 | 59 | 33 |
| 1128019 | 64 | 71 |
| 1128036 | 59‡ | 20‡ |
| 1128609 | 30 | 37 |

‡Indicates that fewer than 3 samples were available

TABLE 63
Reduction of human GYS1 RNA in transgenic
mice compared to PBS control

| | |
|---|---|
| | GYS1 RNA |
| Compound | (% reduction) |

| Number | Cortex | Spinal Cord |
|---|---|---|
| 941428 | 18 | 6 |
| 941573 | 30‡ | 22‡ |
| 941679 | 35 | 35 |
| 941715 | 70 | 73 |
| 941722 | 27‡ | 12‡ |
| 1126449 | 26‡ | 7 |
| 1126931 | 30 | 23 |
| 1127001 | 65 | 73 |
| 1127015 | 73 | 69 |
| 1127042 | 68‡ | 70‡ |
| 1127239 | 26 | 39 |
| 1127242 | 47‡ | 41‡ |
| 1127402 | 80 | 72 |
| 1127411 | 64 | 77 |
| 1127413 | 66 | 69 |
| 1127434 | 74‡ | 74‡ |
| 1127498 | 32 | 30 |
| 1127604 | 47 | 47 |
| 1127710 | 32 | 52 |
| 1127954 | 69 | 75 |
| 1128028 | 41 | 63 |
| 1128038 | 40 | 55 |

‡Indicates that fewer than 3 samples were available

TABLE 64
Reduction of human GYS1 RNA in transgenic
mice compared to PBS control

| | |
|---|---|
| | GYS1 RNA |
| Compound | (% reduction) |

| Number | Cortex | Spinal Cord |
|---|---|---|
| 941573 | 0 | 32 |
| 941679 | 35 | 30 |
| 941715 | 60 | 81 |
| 941721 | 47 | 51 |
| 1126449 | 46 | 59 |
| 1126931 | 0‡ | 12‡ |
| 1127015 | 55 | 65 |
| 1127242 | 47 | 46 |
| 1127411 | 75 | 81 |
| 1127413 | 60 | 80 |
| 1127498 | 39 | 29 |
| 1127604 | 65 | 47 |
| 1127710 | 57 | 57 |
| 1127954 | 74 | 70 |
| 1128028 | 62 | 72 |
| 1128036 | 63 | 42 |
| 1251609 | 64‡ | 56 |
| 1251611 | 65 | 66 |
| 1251612 | 29‡ | 35‡ |
| 1251613 | 74 | 73 |
| 1251614 | 44‡ | 28‡ |
| 1251615 | 57 | 58 |
| 1251617 | 48 | 38 |
| 1251619 | 30 | 21 |
| 1251620 | 42 | 38 |
| 1251624 | 79 | 57 |
| 1251625 | 64 | 61 |
| 1251626 | 76 | 73 |
| 1251627 | 78 | 69 |

‡Indicates that fewer than 3 samples were available

TABLE 65
Reduction of human GYS1 RNA in transgenic
mice compared to PBS control

| | |
|---|---|
| | GYS1 RNA |
| Compound | (% reduction) |

| Number | Cortex | Spinal cord |
|---|---|---|
| 941635 | 91 | 71 |
| 941653 | 75 | 74 |
| 1126292 | 59 | 72 |
| 1126293 | 43 | 54 |
| 1127250 | 68 | 57 |
| 1127253 | 72 | 66 |
| 1127286 | 57 | 61 |
| 1127418 | 73 | 80 |
| 1127419 | 96 | 86 |
| 1127420 | 94 | 77 |
| 1127421 | 53 | 58 |
| 1127422 | 36 | 39 |
| 1127423 | 68 | 50 |
| 1127424 | 63 | 49 |
| 1127425 | 50 | 37 |
| 1127426 | 54 | 69 |
| 1127427 | 68 | 64 |
| 1127817 | 67 | 68 |
| 1127953 | 63 | 56 |
| 1127955 | 86 | 87 |
| 1127956 | 91 | 83 |
| 1127957 | 43 | 53 |
| 1127958 | 44 | 36 |
| 1127959 | 48 | 51 |
| 1127961 | 71 | 56 |
| 1128004 | 48 | 55 |
| 1128009 | 88 | 69 |

TABLE 66
Reduction of human GYS1 RNA in transgenic
mice compared to PBS control

| | |
|---|---|
| | GYS1 RNA |
| Compound | (% reduction) |

| Number | Cortex | Spinal Cord |
|---|---|---|
| 1251609 | 49 | 59 |
| 1251611 | 55 | 63 |
| 1251612 | 16 | 38 |
| 1251613 | 76‡ | 77‡ |
| 1251614 | 40 | 58 |
| 1251615 | 39 | 73 |
| 1251617 | 31 | 44 |
| 1251619 | 5 | 38 |
| 1251620 | 9‡ | 50‡ |
| 1251624 | 23 | 59 |
| 1251625 | 29 | 54 |
| 1251626 | 46 | 69 |
| 1251627 | 61 | 72 |
| 941358 | 27 | 56 |
| 941636 | 69 | 75 |
| 941652 | 44 | 47 |
| 1126291 | 44‡ | 52‡ |
| 1127292 | 62 | 78 |
| 1127385 | 75 | 84 |
| 1127391 | 78 | 76 |
| 1127444 | 55 | 63 |
| 1127538 | 35 | 55 |
| 1127747 | 66 | 55 |
| 1127762 | 21 | 49 |
| 1127879 | 47 | 74 |

‡Indicates that fewer than 3 samples were available

TABLE 67
Reduction of human GYS1 RNA in transgenic
mice compared to PBS control

| | |
|---|---|
| | GYS1 RNA |
| Compound | (% reduction) |

| Number | Cortex | Spinal Cord |
|---|---|---|
| 941426 | 33 | 36 |
| 941427 | 42 | 39 |
| 941429 | 10 | 29 |
| 941430 | 24 | 40 |
| 941558 | 31 | 35 |
| 941648 | 58 | 77 |
| 941678 | 58 | 66 |
| 941690 | 49 | 72 |
| 941724 | 17 | 59 |
| 1126455 | 0 | 56 |
| 1126784 | 0 | 49 |
| 1126902 | 0 | 19 |
| 1127014 | 60‡ | 73‡ |
| 1127017 | 19 | 42 |
| 1127019 | 37 | 75 |
| 1127091 | 52‡ | 81‡ |
| 1127172 | 34 | 60 |
| 1127313 | 34‡ | 55‡ |
| 1127335 | 29 | 68 |
| 1127369 | 39 | 75 |
| 1127384 | 62 | 84 |
| 1128032 | 27 | 80 |
| 1128033 | 2 | 69 |
| 1128035 | 29 | 68 |
| 1128039 | 42 | 72 |
| 1270757 | 18 | 65 |
| 1270759 | 16‡ | 37‡ |
| 1270761 | 0 | 15 |
| 1270762 | 0 | 51 |
| 1270763 | 0 | 29 |
| 1270766 | 12 | 53 |
| 1270773 | 50 | 49 |

‡Indicates that fewer than 3 samples were available

TABLE 68
Reduction of human GYS1 RNA in transgenic
mice compared to PBS control

| | |
|---|---|
| | GYS1 RNA |
| Compound | (% reduction) |

| Number | Cortex | Spinal Cord |
|---|---|---|
| 941717 | 84 | 35 |
| 941772 | 59‡ | 28‡ |
| 1126331 | 34 | 45 |
| 1126889 | 0 | 0 |
| 1126933 | 0‡ | 0‡ |
| 1126997 | 0‡ | 0‡ |
| 1127103 | 8 | 65 |
| 1127782 | 0 | 1 |
| 1127954 | 72 | 81 |
| 1251610 | 0 | 0 |
| 1251616 | 11 | 21 |
| 1251618 | 31 | 52 |
| 1251621 | 0 | 5 |
| 1251622 | 14 | 31 |
| 1251623 | 25 | 31 |
| 1251628 | 63 | 62 |
| 1270756 | 2 | 47 |
| 1270760 | 0 | 0 |
| 1270769 | 4 | 42 |
| 1270774 | 0 | 18 |
| 1270775 | 5 | 14 |
| 1270776 | 2 | 45 |
| 1270782 | 0 | 0 |
| 1270784 | 62 | 80 |
| 1270786 | 0 | 16 |
| 1270787 | 0 | 21 |
| 1270793 | 0 | 52 |
| 1270796 | 0 | 53 |

‡Indicates that fewer than 3 samples were available

TABLE 69
Reduction of human GYS1 RNA in transgenic
mice compared to PBS control

| | |
|---|---|
| | GYS1 RNA |
| Compound | (% reduction) |

| Number | Cortex | Spinal Cord |
|---|---|---|
| 941424 | 64 | 29 |
| 941605 | 67 | 83 |
| 1126777 | 23 | 24 |
| 1126930 | 38 | 4 |
| 1127214 | 37‡ | 21‡ |
| 1127241 | 88 | 73 |
| 1127749 | 44‡ | 19‡ |
| 1128041 | 74 | 70 |
| 1128483 | 56 | 30 |
| 1270758 | 63 | 49 |
| 1270764 | 96‡ | 88‡ |
| 1270765 | 43 | 43 |
| 1270767 | 58 | 54 |
| 1270768 | 77 | 61 |
| 1270770 | 63 | 44 |
| 1270772 | 47 | 50 |
| 1270777 | 70 | 64 |
| 1270779 | 82 | 64 |
| 1270780 | 49 | 23 |
| 1270781 | 60 | 34 |
| 1270783 | 82 | 70 |
| 1270788 | 79 | 58 |
| 1270789 | 56 | 45 |
| 1270791 | 51 | 40 |

‡Indicates that fewer than 3 samples were available

TABLE 70
Reduction of human GYS1 RNA in transgenic
mice compared to PBS control

| | |
|---|---|
| | GYS1 RNA |
| Compound | (% reduction) |

| Number | Cortex | Spinal Cord |
|---|---|---|
| 648374 | 38 | 38 |
| 941370 | 96 | 94 |
| 941555 | 21 | 8 |
| 941588 | 0 | 54 |
| 941617 | 19 | 69 |
| 941629 | 43‡ | 85‡ |
| 1126340 | 33 | 86 |
| 1126459 | 0 | 57 |
| 1126850 | 0 | 55 |
| 1127018 | 65 | 88 |
| 1127095 | 5 | 87 |
| 1127102 | 64 | 91 |
| 1127186 | 0 | 69 |
| 1127201 | 68 | 82 |
| 1127223 | 8 | 77 |
| 1127233 | 0 | 76 |
| 1127234 | 26 | 83 |
| 1127238 | 32 | 83 |
| 1127412 | 2 | 86 |
| 1127445 | 0 | 80 |
| 1127790 | 39‡ | 83‡ |
| 1270771 | 0 | 67 |
| 1270778 | 0 | 91 |
| 1270785 | 0 | 65 |
| 1270790 | 18 | 70 |
| 1270792 | 10‡ | 74‡ |
| 1270794 | 0 | 74 |
| 1270795 | 0 | 53 |
| 1270755 | 31 | 80 |

‡Indicates that fewer than 3 samples were available

TABLE 71
Reduction of human GYS1 RNA in transgenic
mice compared to PBS control

| | |
|---|---|
| | GYS1 RNA |
| Compound | (% reduction) |

| Number | Cortex | Spinal Cord |
|---|---|---|
| 648408 | 57 | 43 |
| 648409 | 86 | 63 |
| 941654 | 29 | 40 |
| 941693 | 0 | 26 |
| 1126413 | 75 | 66 |
| 1126804 | 27 | 30 |
| 1127037 | 36 | 49 |
| 1127085 | 21‡ | 42‡ |
| 1127243 | 77 | 65 |
| 1127260 | 96 | 88 |
| 1127329 | 55 | 72 |
| 1127403 | 63 | 66 |
| 1127404 | 79 | 68 |
| 1127408 | 40 | 55 |
| 1127726 | 40 | 46 |
| 1127808 | 74 | 49 |
| 1127809 | 44 | 46 |
| 1127810 | 19 | 33 |
| 1127811 | 23 | 50 |
| 1127812 | 40 | 35 |
| 1127813 | 32 | 31 |
| 1127814 | 71 | 44 |
| 1127815 | 30‡ | 56‡ |
| 1127816 | 30 | 38 |
| 1127818 | 59‡ | 63‡ |
| 1127819 | 45 | 40 |
| 1127820 | 51‡ | 58‡ |
| 1127954 | 91 | 87 |

‡Indicates that fewer than 3 samples were available

TABLE 72
Reduction of human GYS1 RNA in transgenic
mice compared to PBS control

| | |
|---|---|
| | GYS1 RNA |
| Compound | (% reduction) |

| Number | Cortex | Spinal Cord |
|---|---|---|
| 648410 | 76 | 54 |
| 941459 | 66 | 66 |
| 941462 | 7 | 26 |
| 941640 | 62 | 54 |
| 941641 | 71 | 59 |
| 941651 | 75 | 69 |
| 941725 | 43 | 47 |
| 1126323 | 30 | 33 |
| 1126341 | 68 | 50 |
| 1126454 | 33 | 44 |
| 1126461 | 24 | 22 |
| 1126805 | 10‡ | 16‡ |
| 1127020 | 77 | 63 |
| 1127200 | 64‡ | 69‡ |
| 1127300 | 78 | 70 |
| 1127393 | 56 | 49 |
| 1127405 | 70 | 60 |
| 1127406 | 22 | 52 |
| 1127407 | 0 | 18 |
| 1127578 | 21 | 17 |
| 1127669 | 88 | 82 |
| 1128006 | 71 | 74 |
| 1128007 | 77 | 74 |
| 1128008 | 69 | 50 |
| 1128013 | 88 | 78 |
| 1128014 | 79 | 70 |
| 1128026 | 45 | 45 |
| 1128029 | 49 | 38 |
| 1128036 | 70 | 58 |

‡Indicates that fewer than 3 samples were available

TABLE 73
Reduction of human GYS1 RNA in transgenic
mice compared to PBS control

| | |
|---|---|
| | GYS1 RNA |
| Compound | (% reduction) |

| Number | Cortex | Spinal Cord |
|---|---|---|
| 941365 | 48 | 56 |
| 941450 | 43‡ | 72‡ |
| 1126290 | 26 | 61 |
| 1126294 | 32 | 78 |
| 1126315 | 56 | 70 |
| 1126316 | 51 | 75 |
| 1126317 | 42 | 74 |
| 1126318 | 37 | 67 |
| 1126319 | 30 | 71 |
| 1126320 | 54 | 74 |
| 1126321 | 55 | 74 |
| 1126322 | 51 | 64‡ |
| 1126324 | 26 | 67 |
| 1126325 | 47 | 75 |
| 1126326 | 38 | 76 |
| 1126327 | 47 | 68 |
| 1126328 | 40 | 71 |
| 1126329 | 43 | 70 |
| 1126795 | 0 | 48 |
| 1126885 | 0 | 47 |
| 1126933 | 0 | 41 |
| 1126998 | 52 | 77 |
| 1127013 | 17 | 76 |
| 1127038 | 38 | 73 |
| 1127428 | 95 | 98 |
| 1127821 | 67 | 72 |
| 1127964 | 81 | 82 |
| 1128010 | 0 | 57 |
| 1128011 | 0 | 55 |
| 1128012 | 0 | 57 |
| 1128015 | 49 | 77 |
| 1128278 | 11 | 46 |
| 1128284 | 28‡ | 43‡ |
| 1270764 | 79 | 88 |

‡Indicates that fewer than 3 samples were available

TABLE 74
Reduction of human GYS1 RNA in transgenic
mice compared to PBS control

| | |
|---|---|
| | GYS1 RNA |
| Compound | (% reduction) |

| Number | Cortex | Spinal Cord |
|---|---|---|
| 648138 | 60 | 53 |
| 648146 | 52 | 51 |
| 941369 | 62 | 61 |
| 1126330 | 79 | 62 |
| 1126332 | 90 | 76 |
| 1126339 | 82 | 69 |
| 1127009 | 91 | 73 |
| 1127764 | 41‡ | 61‡ |
| 1128021 | 74 | 75 |
| 1311839 | 76 | 77 |
| 1311847 | 55 | 80 |
| 1311849 | 86 | 83 |
| 1311850 | 86 | 81 |
| 1311851 | 92 | 94 |
| 1311852 | 94 | 91 |
| 1311854 | 83 | 81 |
| 1311855 | 74 | 74 |
| 1311857 | 95 | 89 |
| 1311859 | 77 | 82 |
| 1311860 | 94 | 76 |
| 1311861 | 95 | 83 |
| 1311876 | 89‡ | 82‡ |
| 1311877 | 86 | 69 |
| 1311878 | 47‡ | 71‡ |
| 1318942 | 35 | 49 |
| 1318946 | 36 | 50 |
| 1318947 | 47‡ | 64‡ |

‡Indicates that fewer than 3 samples were available

TABLE 75
Reduction of human GYS1 RNA in transgenic
mice compared to PBS control

| | |
|---|---|
| | GYS1 RNA |
| Compound | (% reduction) |

| Number | Cortex | Spinal Cord |
|---|---|---|
| 1311835 | 89 | 74 |
| 1311836 | 88 | 71 |
| 1311837 | 80 | 68 |
| 1311862 | 57 | 58 |
| 1311863 | 56 | 42 |
| 1311864 | 83 | 75 |
| 1311865 | 87 | 72 |
| 1311866 | 54‡ | 49‡ |
| 1311867 | 80 | 68 |
| 1311868 | 66 | 58 |
| 1311869 | 85 | 76 |
| 1311870 | 63 | 59 |
| 1311872 | 73 | 76 |
| 1311873 | 64 | 64 |
| 1311874 | 85 | 78 |
| 1311875 | 52 | 50 |
| 1318949 | 78 | 81 |
| 1318951 | 71 | 52 |
| 1318952 | 58‡ | 47‡ |
| 1318955 | 43 | 42 |
| 1318956 | 37 | 32 |
| 1318957 | 68 | 64 |
| 1318958 | 68 | 29 |
| 1318959 | 62‡ | 38‡ |

‡Indicates that fewer than 3 samples were available

TABLE 76
Reduction of human GYS1 RNA in transgenic
mice compared to PBS control

| | |
|---|---|
| | GYS1 RNA |
| Compound | (% reduction) |

| Number | Cortex | Spinal Cord |
|---|---|---|
| 648378 | 27 | 26 |
| 1126333 | 64 | 60 |
| 1311840 | 68 | 68 |
| 1311841 | 73 | 72 |
| 1311842 | 71 | 54 |
| 1311843 | 43 | 51 |
| 1311844 | 51 | 45 |
| 1311845 | 41 | 53 |
| 1311846 | 55 | 60 |
| 1311848 | 78 | 72 |
| 1311853 | 79 | 78 |
| 1311856 | 94 | 87 |
| 1311858 | 94 | 89 |
| 1318941 | 31‡ | 18‡ |
| 1318943 | 15 | 6 |
| 1318944 | 0 | 0 |
| 1318945 | 9 | 21 |
| 1318948 | 23 | 0 |
| 1318950 | 91 | 90 |
| 1318953 | 61 | 42 |
| 1318954 | 53 | 43 |
| 1318960 | 36 | 55 |

‡Indicates that fewer than 3 samples were available

TABLE 77
Reduction of human GYS1 RNA in transgenic
mice compared to PBS control

| | |
|---|---|
| | GYS1 RNA |
| Compound | (% reduction) |

| Number | Cortex | Spinal Cord |
|---|---|---|
| 1311843 | 33 | 47 |
| 1318961 | 5 | 3 |
| 1318962 | 51 | 47 |
| 1318964 | 58 | 38 |
| 1318966 | 45 | 41 |
| 1318967 | 28 | 38 |
| 1318968 | 31 | 6 |
| 1318969 | 8‡ | 0‡ |
| 1318970 | 4 | 0 |
| 1318971 | 17 | 5 |
| 1318972 | 0 | 0 |
| 1318974 | 24 | 13 |
| 1318975 | 27 | 13 |
| 1318976 | 0 | 11 |
| 1318977 | 0 | 0 |
| 1318978 | 23 | 4 |
| 1318979 | 83 | 72 |
| 1318980 | 72 | 55 |
| 1318981 | 85 | 82 |
| 1318983 | 90 | 72 |
| 1318986 | 66 | 25 |
| 1318989 | 26 | 3 |
| 1318992 | 38 | 0 |

‡Indicates that fewer than 3 samples were available

TABLE 78
Reduction of human GYS1 RNA in transgenic
mice compared to PBS control

| | |
|---|---|
| | GYS1 RNA |
| Compound | (% reduction) |

| Number | Cortex | Spinal Cord |
|---|---|---|
| 1318963 | 29 | 49 |
| 1318973 | 32 | 3 |
| 1318982 | 44 | 36 |
| 1318984 | 55 | 39 |
| 1318985 | 36 | 42 |
| 1318987 | 76 | 74 |
| 1318988 | 75 | 64 |
| 1318990 | 79 | 60 |
| 1318991 | 62 | 49 |
| 1318993 | 64 | 31 |

### Example 6: Potency of Modified Oligonucleotides Complementary to Human GYS1 in Transgenic Mice

[0629] Modified oligonucleotides described above were tested in the human GYS1 transgenic mouse model FVB-Tg (described herein above).

### Treatment

[0630] The GYS1 transgenic mice were divided into groups of 4 mice each. Each mouse received a single ICV bolus of modified oligonucleotide at the doses indicated in the tables below. A group of 4 mice received PBS as a negative control.

### RNA Analysis

[0631] Two weeks post treatment, mice were sacrificed, and RNA was extracted from the cortex, spinal cord, and hippocampus for RT-PCR analysis of RNA expression of GYS1 using Human GYS1 primer probe set RTS36345 (described herein above). Results are presented as percent reduction of GYS1 relative to the amount of GYS1 RNA in the PBS control, normalized to mouse cyclophilin A. Mouse cyclophilin A was amplified using primer probe set m_cyclo24 (described herein above). As used herein, a value of ‘0’ indicates that treatment with the modified oligonucleotide did not inhibit GYS1 mRNA levels.

[0632] As shown in the table below, treatment with modified oligonucleotides resulted in dose-responsive reduction of GYS1 RNA in comparison to the amount of GYS1 RNA in the PBS control (designated as 0% reduction). Dose response data were analyzed using Microsoft Excel (v14.4) and GraphPad Prism software (v 8.2.0, San Diego, CA). ED₅₀ values were calculated from log transformed dose or concentrations and individual animal GYS1 mRNA levels using the built in GraphPad formula “log(agonist) vs. response—Find ECanything”, with the following constraints: bottom=0, top=100, and F=50 for ED₅₀.

TABLE 79
Reduction of human GYS1 RNA in transgenic
mice compared to PBS control

GYS1 (% reduction)

| Compound | Dose | | ED₅₀ | Spinal | ED₅₀ |
|---|---|---|---|---|---|
| Number | (μg) | Cortex | (μg) | Cord | (μg) |
| 1127711 | 10 | 21 | 216 | 31 | 25 |
| | 30 | 26 | | 62 | |
| | 100 | 53‡ | | 67‡ | |
| | 300 | 50 | | 79 | |
| | 700 | 61 | | 81 | |
| 1127954 | 10 | 12 | 32 | 51 | 9 |
| | 30 | 51‡ | | 76‡ | |
| | 100 | 86 | | 86 | |
| | 300 | 84‡ | | 91‡ | |
| | 700 | 90 | | 94 | |
| 1127962 | 10 | 0 | 44 | 56 | 5 |
| | 30 | 29 | | 74 | |
| | 100 | 85‡ | | 73 | |
| | 300 | 90 | | 88 | |
| | 700 | 94 | | 95 | |
| 1127963 | 10 | 6 | 42 | 62 | 5 |
| | 30 | 49 | | 71 | |
| | 100 | 70 | | 88 | |
| | 300 | 90 | | 93 | |
| | 700 | 93 | | 93 | |

‡Indicates that fewer than 4 samples were available

TABLE 80
Reduction of human GYS1 RNA in transgenic
mice compared to PBS control

GYS1 (% reduction)

| Compound | Dose | | ED₅₀ | Spinal | ED₅₀ |
|---|---|---|---|---|---|
| Number | (μg) | Cortex | (μg) | Cord | (μg) |
| 648411 | 10 | 38‡ | 17 | 30‡ | 28 |
| | 30 | 60 | | 53 | |
| | 100 | 82 | | 73 | |
| | 300 | 80 | | 79 | |
| | 700 | 90 | | 85 | |
| 941366 | 10 | 0 | 187 | 26 | 155 |
| | 30 | 20 | | 16 | |
| | 100 | 57‡ | | 47‡ | |
| | 300 | 56 | | 62 | |
| | 700 | 64‡ | | 69‡ | |
| 941715 | 10 | 59 | 4 | 29 | 23 |
| | 30 | 75 | | 65 | |
| | 100 | 85 | | 68‡ | |
| | 300 | 85 | | 87 | |
| | 700 | 92 | | 89 | |
| 1127430 | 10 | 59 | 5 | 38 | 13 |
| | 30 | 76‡ | | 75 | |
| | 100 | 84 | | 79‡ | |
| | 300 | 91 | | 82 | |
| | 700 | 93‡ | | 88‡ | |
| 1127979 | 10 | 7 | 67 | 33 | 36 |
| | 30 | 42 | | 50 | |
| | 100 | 60 | | 64 | |
| | 300 | 76 | | 73 | |
| | 700 | 83 | | 77 | |
| 1128018 | 10 | 49‡ | 12 | 14 | 138 |
| | 30 | 65‡ | | 42‡ | |
| | 100 | 60 | | 26 | |
| | 300 | 85 | | 72 | |
| | 700 | 84 | | 76 | |

‡Indicates that fewer than 4 samples were available

TABLE 81
Reduction of human GYS1 RNA in transgenic
mice compared to PBS control

GYS1 (% reduction)

| Compound | Dose | | ED₅₀ | Spinal | ED₅₀ |
|---|---|---|---|---|---|
| Number | (μg) | Cortex | (μg) | Cord | (μg) |
| 1127432 | 10 | 28 | 36 | 4 | 52 |
| | 30 | 52 | | 49 | |
| | 100 | 62 | | 67 | |
| | 300 | 83 | | 81 | |
| | 700 | 84‡ | | 77‡ | |
| 1127981 | 10 | 21 | 19 | 32 | 19 |
| | 30 | 74 | | 65 | |
| | 100 | 86 | | 84 | |
| | 300 | 96 | | 91 | |
| | 700 | 96‡ | | 95‡ | |
| 1128016 | 10 | 34 | 132 | 17 | 83 |
| | 30 | 26 | | 40 | |
| | 100 | 41 | | 56 | |
| | 300 | 61 | | 69 | |
| | 700 | 73 | | 72 | |

‡Indicates that fewer than 4 samples were available

TABLE 82
Reduction of human GYS1 RNA in transgenic
mice compared to PBS control

GYS1 (% reduction)

| Compound | Dose | | ED₅₀ | Spinal | ED₅₀ |
|---|---|---|---|---|---|
| Number | (μg) | Cortex | (μg) | Cord | (μg) |
| 1318950 | 3 | 9 | 18 | 47 | 4 |
| | 10 | 27 | | 61 | |
| | 30 | 74 | | 71 | |
| | 100 | 85 | | 94 | |
| | 300 | 95 | | 95 | |
| 1311858 | 3 | 16 | 25 | 20 | 7 |
| | 10 | 17 | | 67 | |
| | 30 | 58 | | 82 | |
| | 100 | 87 | | 88 | |
| | 300 | 95‡ | | 95‡ | |
| 1311849 | 3 | 17 | 74 | 0 | 25 |
| | 10 | 0 | | 56 | |
| | 30 | 33 | | 52 | |
| | 100 | 60 | | 75 | |
| | 300 | 78 | | 76 | |
| 1311869 | 3 | 9 | 42 | 10 | 25 |
| | 10 | 22 | | 0 | |
| | 30 | 40 | | 69 | |
| | 100 | 71 | | 77 | |
| | 300 | 85 | | 81 | |

‡Indicates that fewer than 4 samples were available

TABLE 83
Reduction of human GYS1 RNA in transgenic
mice compared to PBS control

GYS1 (% reduction)

| Compound | Dose | | ED₅₀ | Spinal | ED₅₀ |
|---|---|---|---|---|---|
| Number | (μg) | Cortex | (μg) | Cord | (μg) |
| 1127260 | 3 | 12 | 20 | 10 | 53 |
| | 10 | 42 | | 33 | |
| | 30 | 57 | | 41 | |
| | 100 | 79 | | 63 | |
| | 300 | 84 | | 69 | |
| 1127955 | 3 | 50 | 5 | 24 | 18 |
| | 10 | 46 | | 39 | |
| | 30 | 83 | | 58 | |
| | 100 | 88 | | 79 | |
| | 300 | 96 | | 85 | |
| 1127956 | 3 | 17 | 19 | 22 | 32 |
| | 10 | 47 | | 40 | |
| | 30 | 55‡ | | 50‡ | |
| | 100 | 71 | | 55 | |
| | 300 | 93 | | 81 | |
| 1128013 | 3 | 26 | 28 | 7 | 44 |
| | 10 | 37 | | 35 | |
| | 30 | 52 | | 48 | |
| | 100 | 57 | | 62 | |
| | 300 | 85 | | 71 | |
| 1311856 | 3 | 29 | 6 | 35 | 6 |
| | 10 | 74 | | 59 | |
| | 30 | 66 | | 81 | |
| | 100 | 91 | | 84 | |
| | 300 | 91 | | 90 | |
| 1311848 | 3 | 36 | 11 | 29 | 14 |
| | 10 | 47 | | 57 | |
| | 30 | 62 | | 53 | |
| | 100 | 73‡ | | 70‡ | |
| | 300 | 86‡ | | 76‡ | |
| 1311853 | 3 | 28 | 14 | 16 | 18 |
| | 10 | 49 | | 40 | |
| | 30 | 51 | | 65 | |
| | 100 | 83‡ | | 79‡ | |
| | 300 | 89‡ | | 78‡ | |

‡Indicates that fewer than 4 samples were available

TABLE 84
Reduction of human GYS1 RNA in transgenic
mice compared to PBS control

GYS1 (% reduction)

| Compound | Dose | | ED₅₀ | Spinal | ED₅₀ |
|---|---|---|---|---|---|
| Number | (μg) | Cortex | (μg) | Cord | (μg) |
| 1127954 | 1 | 33‡ | 8 | 0‡ | 32 |
| | 3 | 25‡ | | 23‡ | |
| | 10 | 60 | | 18 | |
| | 30 | 58‡ | | 51‡ | |
| | 100 | 85 | | 78 | |
| | 300 | 94 | | 84 | |

‡Indicates that fewer than 4 samples were available

### Example 7: Activity of Modified Oligonucleotides Complementary to Human GYS1 in Transgenic Mice

[0633] Modified oligonucleotides selected from above were tested in the human GYS1 transgenic mouse model FVB-Tg (described herein above).

### Treatment

[0634] GYS1 transgenic mice were divided into groups of 4 mice each. Each mouse received a single ICV bolus of 200 g of modified oligonucleotide. A group of 4 mice received PBS as a negative control.

### RNA Analysis

[0635] Eight weeks post treatment, mice were sacrificed and RNA was extracted from cortical brain tissue, spinal cord, and hippocampus for RT-PCR analysis to measure the amount of GYS1 RNA using human GYS1 primer probe set RTS36345 (described herein above). Results are presented as percent reduction of GYS1 relative to the amount of GYS1 RNA in the PBS control normalized to mouse cyclophilin A. Mouse cyclophilin A was amplified using primer probe set m_cyclo24 (described herein above).

[0636] As shown in the table below, reduction of GYS1 RNA was observed 8 weeks after administration of the modified oligonucleotides (in comparison with the amount of GYS1 RNA in the PBS control designated as 0% reduction).

TABLE 85
Reduction of human GYS1 RNA in transgenic
mice compared to PBS control

| | |
|---|---|
| Compound | GYS1 RNA (% reduction) |

| Number | Cortex | Spinal Cord | Hippocampus |
|---|---|---|---|
| 941635 | 76 | 69 | 62 |
| 1127955 | 87 | 66 | 72 |
| 1127956 | 75 | 67 | 71 |
| 1128009 | 67 | 43 | 26 |

TABLE 86
Reduction of human GYS1 RNA in transgenic
mice compared to PBS control

| | |
|---|---|
| Compound | GYS1 RNA (% reduction) |

| Number | Cortex | Spinal Cord | Hippocampus |
|---|---|---|---|
| 648411 | 71‡ | 69‡ | 68‡ |
| 1127260 | 73 | 67 | 64 |
| 1127430 | 80‡ | 79‡ | 84‡ |
| 1127432 | 81‡ | 70‡ | 79‡ |
| 1127954 | 86 | 70 | 84 |
| 1127956 | 75 | 69 | 68 |
| 1127962 | 71 | 49 | 69 |
| 1127963 | 55 | 50 | 65 |
| 1251626 | 54 | 41 | 46 |
| 1311835 | 23 | 27 | 38 |
| 1311848 | 73 | 59 | 71 |
| 1311853 | 78‡ | 80‡ | 87‡ |
| 1311854 | 70‡ | 17‡ | 49‡ |
| 1311856 | 81‡ | 69‡ | 75‡ |
| 1311858 | 86 | 86 | 91 |

‡Indicates that fewer than 4 samples were available

The application's sequence listing, which the Patent Office published only in electronic form, follows.

SEQUENCE LISTING (3036 sequences)

SEQ ID NO: 1 - RNA, 3635 nt, Homo sapiens
  source 1..3635: mol_type = mRNA
tcctggcggctgcgaggtttcactgcaggggcgccagtgggctcagtgacgctgcggcctccttctgcctaggtcccaacgcttcggggcaggggtgcggtcttgcaataggaagccgagcgtcttgcaagcttcccgtcgggcaccagctactcggccccgcaccctacctggtgcattccctagacacctccggggtccctacctggagatccccggagccccccttcctgcgccagccatgcctttaaaccgcactttgtccatgtcctcactgccaggactggaggactgggaggatgaattcgacctggagaacgcagtgctcttcgaagtggcctgggaggtggctaacaaggtgggtggcatctacacggtgctgcagacgaaggcgaaggtgacaggggacgaatggggcgacaactacttcctggtggggccgtacacggagcagggcgtgaggacccaggtggaactgctggaggcccccaccccggccctgaagaggacactggattccatgaacagcaagggctgcaaggtgtatttcgggcgctggctgatcgagggaggccctctggtggtgctcctggacgtgggtgcctcagcttgggccctggagcgctggaagggagagctctgggatacctgcaacatcggagtgccgtggtacgaccgcgaggccaacgacgctgtcctctttggctttctgaccacctggttcctgggtgagttcctggcacagagtgaggagaagccacatgtggttgctcacttccatgagtggttggcaggcgttggactctgcctgtgtcgtgcccggcgactgcctgtagcaaccatcttcaccacccatgccacgctgctggggcgctacctgtgtgccggtgccgtggacttctacaacaacctggagaacttcaacgtggacaaggaagcaggggagaggcagatctaccaccgatactgcatggaaagggcggcagcccactgcgctcacgtcttcactactgtgtcccagatcaccgccatcgaggcacagcacttgctcaagaggaaaccagatattgtgacccccaatgggctgaatgtgaagaagttttctgccatgcatgagttccagaacctccatgctcagagcaaggctcgaatccaggagtttgtgcggggccatttttatgggcatctggacttcaacttggacaagaccttatacttctttatcgccggccgctatgagttctccaacaagggtgctgacgtcttcctggaggcattggctcggctcaactatctgctcagagtgaacggcagcgagcagacagtggttgccttcttcatcatgccagcgcggaccaacaatttcaacgtggaaaccctcaaaggccaagctgtgcgcaaacagctttgggacacggccaacacggtgaaggaaaagttcgggaggaagctttatgaatccttactggttgggagccttcccgacatgaacaagatgctggataaggaagacttcactatgatgaagagagccatctttgcaacgcagcggcagtctttcccccctgtgtgcacccacaatatgctggatgactcctcagaccccatcctgaccaccatccgccgaatcggcctcttcaatagcagtgccgacagggtgaaggtgattttccacccggagttcctctcctccacaagccccctgctccctgtggactatgaggagtttgtccgtggctgtcaccttggagtcttcccctcctactatgagccttggggctacacaccggctgagtgcacggttatgggaatccccagtatctccaccaatctctccggcttcggctgcttcatggaggaacacatcgcagacccctcagcttacggtatctacattcttgaccggcggttccgcagcctggatgattcctgctcgcagctcacctccttcctctacagtttctgtcagcagagccggcggcagcgtatcatccagcggaaccgcacggagcgcctctccgaccttctggactggaaatacctaggccggtactatatgtctgcgcgccacatggcgctgtccaaggcctttccagagcacttcacctacgagcccaacgaggcggatgcggcccaggggtaccgctacccacggccagcctcggtgccaccgtcgccctcgctgtcacgacactccagcccgcaccagagtgaggacgaggaggatccccggaacgggccgctggaggaagacggcgagcgctacgatgaggacgaggaggccgccaaggaccggcgcaacatccgtgcaccagagtggccgcgccgagcgtcctgcacctcctccaccagcggcagcaagcgcaactctgtggacacggccacctccagctcactcagcaccccgagcgagcccctcagccccaccagctccctgggcgaggagcgtaactaagtccgccccaccacactccccgcctgtcctgcctctctgctccagagagaggatgcagaggggtgctgctcctaaacccccgctccagatctgcactgggtgtggccccgcagtgcccccacccagtccgccaaacactccaccccctccagctccagtttccaagttcctgcactccagaatccacaaagccgtgcctttctctggctccagaatatgcataatcagcgccctggagtcccctgggcctggaccgcttcccagaggccaggaatctgccattactctgcggtggtgccagaggttttaggaaacctggcatggtgctttcaggtctggggcttttagagccccccgtgtggcttacaaattctacagcatacagagcaggccacgctcaggcccggcatgcgggccaccaagttctggaaaccacgtggtgtccctgcgaatggggcgatcaagtccagagccggggcactttcagagtttgaaggtaactgagagcagatggtcctccatttcaactccagaagtggggctctgggagggatgttctagccctccctggcatgtcagagccaggctctgcctggaggatccctccatccggctcctgtcatcccctacactttggccaagcaagaggtggtagaaccacttggctgctcattccttctggaggacacacagtctcagtccagatgccttcctgtctttctggccctttctggaccagatcctactcttcctttctaaatctgagatctccctccagggaatccgcctgcagaggacagagctggctgtcttcccccacccctaacctggcttattcccaactgctctgcccactgtgaaaccactaggttctaggtcctggcttctagatctggaaccttaccacgttactgcatactgatccctttcccatgatccagaactgaggtcactgggttctagaacccccacatttacctcgaggctcttccatccccaaactgtgccctgccttcagctttggtgaaagggagggcccctcatgtgtgctgtgctgtgtctgcaccgcttggtttgcagttgagaggggagggcaggaggggtgtgattggagtgtgtccggagatgagatgaaaaaaatacatctatatttaagaatcccaaaaaaaaaaaaaaaaaa

SEQ ID NO: 2 - DNA, 31000 bp, Homo sapiens
  source 1..31000: mol_type = genomic DNA
ttttttttttttttgagacacagccttactctgtcacccaggctggagtgcagtggcgcgatctcggctcactgcaaccttcgcctcccgggttcaagcaattctcctgcctcagcctccagagtagttgggactacaggcatgtgccaccacgcccggctaattttttttgtatttttaataaagacggggtttcaccatattagccaggctgctctcaaactcctgacctcatgacctgcccgcctcgaccccccaaagtgctgggattacaggtgtgagccaccgcacccggcctaattttcttatttttttgtagagacagggtttcgctatgttgccagggctagtcttaaattcctgggctcaagcaatccttctacctcggactcccaaagtgtgggattacaggcgtgagccactgtgcccagcccacaggtctttcttctcttcttcccctagagaggacatgcagttatccagcccagaggaagcctcctccctctggagccaatcgtttagactttctggccatcaatggtcacaagctttccctgtcactgtgtgaaccttcccacctaccgtctcctataggaagctggaacccaggagcatagaacattacccccagactacaagcagaagactaggcatccccaccccacaaaaaagacatgaatccaggaatcccaaatgtagctctctcaacataaacaggccccttaccaaggactgtctcctataaagactttctctttcatcataagtctctccaaaaccttgctgcccgctgttcccatgaaaaccaaggtcatttcaaaactcagcacacaccgtcccctcatacttccaatactttctccacggtagttctggtcatagccttcctcttctacttccctatccacctcctcctcctccttgccctggtgacagcaacagactcaaatctcatccccagctaccaacaactttctccccctcccttcctccatcttgactgggctcatcatggaaattgaggcacctgtaagcccagcccagtccctaagttcaggtcacattacctttttttttttggagacagagtctcgctttgtcgcccaggctggaatgcagtggcgcgatcttggctcactgcaacttctgcctcccaggttcaagcgattctcctgcctcagccttctgagtagctgggattacaggcctgcaccaccacacctggctaatttttgtatttttaatagagacggggtttcgcaatgttggccacgaactcctgacctgaagtgatccgcccgcctcggcctcccaaagtgctgggattacaggcatgagccaccacgccaggccaaaatcgcttctttattcaggtaattgagcaggtgccaggccaagtttcctggcctctccttcattcacatgtattcattcattcaaatattcaagtgataatttattgagcatttacactgagacgtagcccgtgtgaaatactggaaatatgaaaatggccaaaacggtagcatgacaagatcccgatttctgggtccctaatccttcagtcctctccactaagactctcttgttcctcgacaatttcttcccactaaaggctcactaggcgccctcgcgctctcagacacactgaacaggtacctgcctgtgcttccagcttggaactcaagtgccattggcaccactaacaatccaaggctcccaaatggctcgaagcgcaaggtcctacaaccctcctcatcacacactggcgccaaggactgcggaaccggccgttgcgccaagatgattttgaaagttggagttcctatagcatgatggggccagacccgagattctgggatcccagccccctccccgcctcagatccagaagtccagcccccatgtccccttctcccccagatctgggtggccgagcttcctcctctttcagacccaggagtctgaacccccagatcccccctccctcagacccaggagtcagggcctccagcatcctcctctctcaaactcgagactgctagctcgctcctcaccctccatgcacccacacttacaacggttgccatgatgctcaccaactgccagagtcctagcggaaacggaaacgcgcgaggagcgagatgttctggctcctctaggctagctggttcttcaaagatctcgatggttcctcataaatatgtaaatattgtgggggcgtggcgggactttatgccccgccctcccaccgaggctgcgctggaagacgggcgtccggaactcctgggtccattcccaatgtctcctggctcctcctccttttgctcagccccaccaccgccccgctcaggccgattgcaaaattcttagctgttctttgagtaaccacacgtcctccacgctcctttcctctttatcccaccctcctcctcctccccactttgaggcctccagctccagattgacagagctgaaggccactcgtttccgtaaagcgcagcggcaagctccgccccctggaggtctcacggccgaggcggggccgggacacagcgactccaacccgttccaccaatgaggacacgcggaaatccccgcccccgggcgtgggccaatggcgctggctggggggggcggccaccgcctcctggcggctgcgaggtttcactgcaggggcgccagtgggctcagtgacgctgcggcctccttctgcctaggtcccaacgcttcggggcaggggtgcggtcttgcaataggaagccgagcgtcttgcaagcttcccgtcgggcaccagctactcggccccgcaccctacctggtgcattccctagacacctccggggtccctacctggagatccccggagccccccttcctgcgccagccatgcctttaaaccgcactttgtccatgtcctcactgccaggactggaggactgggaggatgaattcgacctggagaacgcagtgctcttcgaagtggcctgggaggtggctaacaagggtgagcacgccaggcgtcggggcccttgacgagaaggacagtagtggatgggggcccggaactctgagttgtaggaggacggggctactaggggaacccttgtgacctgggcaaggaggctgtgtccttgaggaggggctgggaagccggaggtgggtgggagagggatggttcgtttgacttaagatgaaaggaggctggaagcccgggttctgggtcctagggaagagggcgctaaaatgagactcctaggtcctggaggcaggcttccgagagactagatacctgggtcctgaacagggaaggggatggggggatgggatttctgcgtgcaaacctgggaagctgccggggtttcagacctatgaccctaacagcatggtctaggggataaaactccagatttgagagagagctgactgggagataggaggcctgagcggcggtgggaggacctgaggatctggctgcttaagaataaagatgggacgggctggagactgtaatgaatgcctgggctttgaaggagctgagggcctgagctattagttcctaggagtagaggagcccatggcctgggacacatgcgtactggaataggggaaggctgggaagtcctaagttagtcagaggctgggccctaggatgggaggggctaggagcctgcatttctgtgtcttgggcttcagaaagctgaggttctggccttggagaaggctggggctgaaatccccaggaacaagccaatctcacacctcaaagagcagggtctggggggttgctttgctgggtcttggaggagaaagggactgtgtctcccaggaggagagggggcccgtgaacacccagccgggtatcgccagggcctgggctccaggatgggaggaggctgggggctggggctcctgggtctgggatagggtcatgggagaggcagagccctgcatgctggtgtccctagtcagggagaggaaattgggaggcaggtcagcaaggtccctgggggcagggaatgaccatgcaggcttctcttgggcaatggtgagaagctggattggccatgagggggtctccctcactgggttttggagcctggctgcgatttaaacccagctcctgtgagctgggaactcgggaacctgagtccgggtagtcagtcctcagctctgccatccttagagccccagtgcctaattccttcagaccaaggggtcccggcacccagccccttctctctcagacccagaagtctagcctgagccccctcctccttcagggtcctgaccccagcccccttctcccttagacccaggaggactgccctccagccctcgtgttcccctcatccaagcttccaacccctactccaaactatgggctcccagtcccctcttccccctgagctagaggtctggggcctgagtgccccctacatccccggcccaccccaccccaggccccagaactatggacctcggccggggcctgccctcacacgcttgggcccacagtgggtggcatctacacggtgctgcagacgaaggcgaaggtgacaggggacgaatggggcgacaactacttcctggtggggccgtacacggagcagggcgtgaggacccaggtggaactgctggaggcccccaccccggccctgaagaggacactggattccatgaacagcaagggctgcaaggtgggacgtggcccagcccagggcagaagcgggtggacagcctgccatcggggtgggagccacagacggagagggtgcagggtggacagccccagccagagagcgaggcaggcttggacacaggaaggaggcgtgataggacacccagacagatgcagggcctggaagtgggtgggtggatcccagacatgggcgaatggacagacagatggcaagtatgagacagactgagacggagatccaagaggccaaggtcctcagacccagagagaaagagagcaagatcgaaagacagcctggtcaacatggcgaaaccccgtctctaccaaaaatacaaaaattagctgggtgtggtggcgggtgcctgtaatcccagctactcgggaggctgaggcaggagaatcgcttgaacccgggaggcggaggttgcagtgagctgcgattgggccactgcactccagcctgggcgacggagcgagactctgtctcagaaaagaatgccagccagccaggcagagctggggagaagtgggcctgaggtcaggaaggagcaggattctggagcttgaagttcaagttcaccctccacttgctgcctgtgtgtccttggctaatggacatgctaatagcgtctaccttctagcggtgctgggaggaggaaacagttaataaggacaaagtggttagtagagttcttggcatgaaggtagcacattgtgtgggcggtgattgtcattgttatgatcatcgtcattattgttactaacagccaagcttggagagtgagggggacaggcagaccaagggagaagggtggatggagccacaggcaagagtaatagactggggacagaagagaggccaccagatgtttcagaaagccagtcctagaaggagagagaagcatggaatatcggggaagagaggagaggtcagtggacagacccacaggacagagtctgagatgggcagatcagggattagagaggagggggagttccagggccccagggtgaagacggaaagagacacgctgttgtccaaggagaaagccatcaggcggcacgctgttgtccaaggagaaagccatcaggcggcagggctaagggacagacaggtccaggctggggatggagaggcactgtggttcctttactcattcacagcctctggtttggggtggggtctggaatccattcaggtccgactgtgtccctaagggaacccagaacagcccagtcgcttcctgagggcagctgcttcccacgtgctgggggcctaagaatagcccccccccccccccagcaaaagggcagacaacagctgggagggggagggacctcagagcgaggctccaggcagcaaaaagccaggtcggcgaggagcggggctgcttctccactgctgtggcagcaggcccagaaccaaagccatggtctcagggaggaaaacagccaactggagaaatgtggcagaggcagaagtgagacagcaagtcttagaaacacggcagtggctagaaaaatgcagccctggggcacggacagaggatgggctatgttagaaatgtgtggcgtggccgagggcggtggctcatgcctggaatcccagcactttgggaggccgaggtgagaggatagcttgagcccaggagttcctgacccacctgggcaacatggcgaaactctgtctctactaaaaatacaaaaaattagccaggcatgatggtgcgtgctcgtgatcccagttactcaggaggctgaggtgggaggatgggatgtggaggctgtagtgagccataattttttttttttttttttcagatagaatctcactctgtcgctgagtctggagtgcagtggtacaatctcgactcactgcaacctccgcctcccgcgttcaagcaattctcctgcctcggcctcccaagtagctgggacctcaggcacatgctgccacgcccggctaattttttgtattttagtagagacagggtttcaccatgttgcccaggctggtctcaaactcctgagctcaggcaatccgcccgcctcggccccccaaagagctaggattacaggcgtgagccaccgcgcccagcccagtgagccatgattgcaccactgcactccagcctgggtgaccggagtgagaccctgtcaaaaacaaaaacaaacaaaaaaaaatggaagaaagaaagaaaaaggagagagggagggaaggagggagagagggaaggaaggaaggaaggaagcaaggaaggaaggaaggaggctgtggactacaaaatgggcctatggatagaggaaagaggtcgcaggtgacagatatgtgatgaaaggaacagaaacaaggcatcatggggaagaaaagtggcagcatgaacagtaagagaatcattacaggctgggtgcagtagctcacgcctgtaatcccagcactttggtaggctgaggccaggagtttgagaccagcctgggcaacatggtgaaaccctgtccttacaaaaaagttaaaaattagccgggatgtgataccttgtgcctgtggtcccagctacgtgggaagctgcggtggaaggattgcttgagcctgggagatcgaagcttcagtgaaccgtaattgcaccactcccttccaggctggaggacagagcaagaccccgtctctgaaaataaaaaagggcctgctttaggtggctcacacttctaatctcaacactttgggaggctaagcaagaaaactgcttgaacgcaggagttcacgatcagcctgggcaacatagtgagaccccatctccacaaaaaattaaaaaatcagcctggcatggtggcccacgcctgtaggaggtgaggtgggaggattgactgagccagggaggttgaggctatagtgaaccatgttcacaccactgcactccagcctgggcaacagagcgagaccctgtctgaaaacaaaaaagaagcatcccgtggaaggaattagcatcagaaagaaaagacagtgggagatgcagatggttggtaagagaaatgtggcagcaagtacagaaacaaggcagcaggtaggggaaatgatttgcagagtggccagacagggcagtgggggcatagacacaggacatgtgacatatgtggttataagcagagaaaggaggcagcgagtgggagaagggtagcagttacaggaattaaacaggaggctgggtgcggtggctcacgcctgtaatcccagcactttgggacgccgaggcgggcggatcacaaggtcgggaaatggagatcatcctggctaacacagtgaaacctcgtctctactgaaaatacaaaaaaaagtagccgggcgtggtggcgggccgctgtagtcccagctactcgggaggctgaggcaggagaatggtgtgaacccaggaggcagaggttgcagtgagccgagatcatgccacggcactccagcctgggcaacagagccagactccgtctcaagaaaaaaaaaaaattagccaggtgtgggagcgggtgcctgtaatcccagctacttgggaggctgaggcaggagaattgcttgaacccgggagacagaggttgcagtgagctgagatcgcaccactgcactccagcctgggccacagagtgagactccatctcaaaaaaaagaaagaaagaaagtaagcagggggcacggaaaatattgcaacagagatggaaaaaatgtgtagcaggaataaatcatgcaaatagagaagtaaggctaaggcagcaggtgagaaattagcagcagatatggaaacagaagataagagagctgaggcttaagtctatagacatctgcctgcaaatgggagaaccacggatgagtgaagatatgaggctgaagcccagagcctccctatggtgcctccccaaccccatcccaggtgtatttcgggcgctggctgatcgagggaggccctctggtggtgctcctggacgtgggtgcctcagcttgggccctggagcgctggaagggagagctctgggatacctgcaacatcggagtgccgtggtacgaccgcgaggccaacgacgctgtcctctttggctttctgaccacctggttcctgggtgaggtaggccccgtctgacacattccacccatacctgaaactacaatgaccatcagcccctgggccagaggatgggcttctccctgggcattctgggagtcatagggtcctttaatccaaggattagctctggcctttgaggacatgaacatccaagggcccaggctctactctcgatgccaacttcatttactctagtcttccaagcatagggattcttggaatcagcctcaaagtgaggctggcgggcttgcccgaggaattctaggagttgtagttctctagtgtgatattgctggactcagctctcagatgctgccctggatgctcatgaatccccagcctgacctggttttgacccccttctaggttttaagaggctcaagaagcttagtttccaggctgggcacggtggctcatgcctgtaatcccagcactttgggaggccgatgggggaagatcacgtgaggccaggagttcaagatggccaaacctcgtctttactaaacatacaaaaaaattagctgggtgtggtggtgggcacctgtaatcccaaatcccagctacttgggaggctgagacaggagaattgcttgaacctgggaggcgggaattgcagtgagctgagattgcatcacggcactccagcctgggccacagagtgagacactgtctcaaaaaaaaaaagaaaaagaaaaaaaaaaaaagaagcttaatttctcatgccctgggacaaataattgaggaactggctgctcctatggcattctgggagttgtagtccctttgccaatgttgggtgcagacagcgtacccttgagacaaggggtctttggaaactatgtccaggacctgggaacatgaaaacttcagtctgtccaatctaaccctgccaggacttagatggttggccaaaaaatcctcagttcctgtcaacccctgaggaggcagtcacttgagcccaggagttcaagaccagcctgggctgcctcagggatttacaggtccctgtccggttgggattgctgcagtgggccgctgcccactctgtgcagtagtggtgacagattgacctctccccgagtccttgtccctactggggattgccgattcttttcccaacactcgtggagacagtggccctgtccctgttgcccacagttcctggcacagagtgaggagaagccacatgtggttgctcacttccatgagtggttggcaggcgttggactctgcctgtgtcgtgcccggcgactgcctgtagcaaccatcttcaccacccatgccacgctgctggggcgctacctgtgtgccggtgccgtggacttctacaacaacctggagaacgtgagctgggaccgtggcagatgggggactgcgagtatgccaggaaaacccaaagctctggggggcccaaggggatggcaccccctcttctcccaggatccaggagtccaagtccccagacccctcctacctcagacccaggaatccagcccccagcaccaatttctcttgggaccccagtgtctggacctccagagtcttctccccaatccttctaaccggactgctgtcccctcccacccagttcaacgtggacaaggaagcaggggagaggcagatctaccaccgatactgcatggaaagggcggcagcccactgcgctcacgtcttcactactgtgtcccagatcaccgccatcgaggcacagcacttgctcaagaggaaaccaggtaggggctgggctgaagtccccagacgtgaatgaggtaggcagctgtctatgccaaagccagttgctcctcagcccaagaagcccactgtaagttgaaatagcataaaccgaaaacgtatttcggctgggcatggtggctcacacctgtaatctcagcactttgagaggccaaggcaggagaaccacttgagcccgggaatttgagaccagcctgggcaacatggcgaatccctgtctaaaatattcgccagacatggtgtgtgcctgtatccctagctactcaggaggctgaggtgggaggattgctcgagcctaggaggtcaagggtgcagtgagctgtgatcgtgccattgcatgatttgggtggcctggagagaccctgtcacagcctgggtgacacagtgagaccctgtctcaaaaaataaaaaaatgcatttaatacacctaacctactgaacatcatagcttaggctagtataccttaaatgtgcccagaacactttatgttagcctacgactgggcaaaatcatccaatacaaatctgttttattttatttttatttatttatttatttttgagacggagtctcgctctgtcgcccaggctggagtgcagtggcgctatcttggctcactgtaagctccgcctcccaggttcatgccattctcctgcctcagcctcccaagtagctgggactatacgcgcctgccaccacgcctggctaattttaatacaaacctattttataataaagtgttgaataggctgggcgcagtggctcacacctgtaatcccaacactttgggaggccaaggcgggcagatcacgaggtcaggagatcgagaccagcctggccaacatggcgaaactccatctctactaaaaatacaaaaattagccgggcgtggtggtgggtgcctgtaatcccagctactcgggaggctgaggcaggagaatcacttgaacccaggaggcggaggttgcagtgggccgagatcacaccactgcactccagcctggacaacagagcgagactccatctcaaaaaattaaaaaaaaaaagtgttgaatatctcatcaaaatccaaaattggactcatgtggatgtatgtaactttcacaccatcataaggttgaaaaatcataacttggctgggcacggtggcttacacctgtaatcccagcactttggaaggctgaggtgggcagatcacctgaggtcatgtgctcaagaccagcctggccaacattgtgagaccccctctctgccaaaaatacaaaaattaggtgggcatggtggcaggcgcctgtaatcccagccacccagctactcgggaggctgaggcaggagaatctcttgaacccaggaggcagaggttgtcgtgagccaagattgtgccattgcactccagcctgggcaacaagagcgaaactctgtctcgaaaagaaaaatcataacttggaccatcctaagtcctaagctggggaccatcagttaccatttttttacctaaagaatagagaactacagctcccagaaggctgtgggggtggtgacctgtatttgaggctctctgactatatactctggaggctaatgggaggtataatttctttcatattaatttcagatatgataaaattctgtaattggctaatgtagattggtcttatgaaagggaatggaagatcagtggactttgcttttgagaaaggttaggtcagaactgggcattcttcccagcccttagtatccgttctcagtgagtataaggtgagaactacaactcccagaaggcctttgactggttagctctatatgttccagaactttgccctaggcgctgatgggggttgtagtttttcgttgatatactttaatttctatgaggagaagaaatgattgggtccctgtaagaagcttggaagtagaggatatatcctaggagaagcaggactttggggatgtttaatcatttccatctcagggtgggctaagaggaaacaaaagaagtacaactttcccagaatcaccagtgtggatcagatccctgttagccatttgcagtagctgaggagacttatacttgtgcttgtgaacctaagcaagtaatattaggcaagaaggcatcttggagtcagggtaggtgtgtcaccaagggaactggccaggcatggtggctcacacctgtaatcccagcactttaggaggccagggcaggaagactgcttgaagccaggagtttgagatcagcttgggtaacatgacaagaccccatcactacaaaagtaaaataaataaattagccgggtgtggtagtgcacgcctgtagtgccagctactcgggaggctgaggagggaggattgcttgagcccaggaggtcagggatgcaatgagctgtgattgtgccactgctctccagcctgagcgacagagagaaaccctgtctccaaaaacaaacaaacaaacaaaaaaggtgggaggggggacctcataggaacgctcttgaaacaaaaaaattgcaaaaggcaaagggtgttttcttcatttattcattcaaccacaacattgatctgaatgaacaaataaaacatgggaccctcacccccaatcccagatattgtgacccccaatgggctgaatgtgaagaagttttctgccatgcatgagttccagaacctccatgctcagagcaaggctcgaatccaggagtttgtgcggggccatttttatgggtacgtggggcatatacctaggtcttaagagaggagggcgttgggagcctaaccatctaggtctgggggagggggcagctgggggcccagactcctgggtctgagggagggggcacctgggtattcggcctccttaattcttgagcgctggaacaatgggctcaggattaaaggaaatctccatctaaagagaagaactacaactcccaggaggccccgtgatgcctctgtattacctaagacatcctctgcccccccacccatagcttctgggatttgtagttttgaggccagggctagcgggtgagggctttgggctttaccgtgccttgtgggttctttaggcatctggacttcaacttggacaagaccttatacttctttatcgccggccgctatgagttctccaacaagggtgctgacgtcttcctggaggcattggctcggctcaactatctgctcagagtgaggcctgggctatgaggggacagggagggcaagcaaagcagtttataactagggagaacagccaggcacagtggctcacacctgtaatcccaacacttttggaggccaaggcgggaggatcacttgagcccaggagatggagaccagcctgggcaacatggtgaaaccccatctctacaaaaaatacaaaaattagccaggcatggtggctcacacgtgtagtcccagctactcgggagggtgaacggggaggatcacgcgagcccgggaggtggaggttgcagtgagccaagatcatatcactgcactccagcctgggcgacagaaaaagacgctgtctcaaaaacaaaacaaaacaaaacaaaacaaaaaattacagaacagaaacccaagaagccaggaagatgggggtaggaaagcccctgagtatggtggggggccgtgaggggagtatagagacccagaaagaaggtcagagtccaggtggggactgtcctataattctccttgacaggaatgggtatggcaggatcccagtggtcttgacagaaaggctggctggttccaggcttcccccacatgatcctggcctccccctcctttctttctgcgcaggtgaacggcagcgagcagacagtggttgccttcttcatcatgccagcgcggaccaacaatttcaacgtggaaaccctcaaaggccaagctgtgcgcaaacagctttggttagcagccctcgctccggcccctggcgcagcccactcccagatgcatgctttgggtcctgtgtttctcctagagtctcagttttttgttttgtttgtttgtttgtttgtttgtttttgagacagtctcactctgtcgcccaggctggagtgtagtggtgcgatcttggctcactgcaacctccacctcctgggttcaagcaagtcatctgcctcagcctctcgagtagctgggactacaggtgcacaccaccatgcctggctaatttttgtattttcagtagagatggggtttcaccacattggccagactagtctcaaactcctgatctcgtgatctgcccgcctcagcctcccaaagtgctggaattacaggcatgagccaccgcacccggccctcttttttttttttattttgagatggagttttgctctgtcgcccaagctggagtgcaatggcatgatctcggctcactgcaacctctgcctcctgggttcaagcgattttcctgcctcagcctctgagtagctgggactacaggggtgtgccaccacacctggctaactttttatttttattagagacaggttttcactatattggccaggctggtcttgaactcctgacctcaggtgttccgcctgcctcagcctcccaaagtgctgggattccaggcgtgagccaccacacctagcctttttttgtatttttagtagagatggggtttcaccatgttggccaggctgatcttgaacacctgacctcaggtgatccagccgccttggcatcccaaagtgctgggattacaggggtgagccactgcgcctggcttagtttctttttcttttctctgatttttttttttttttgaaacagagtctcactgttgcccaggctggagtgcagtggcgtaatctcagctcactgtaacctccgcctcccagcaaagctcagtttcttcatctgtaaaaccgttcattcattagcagagatactcactgagcatctactatgtgctagctaatttttatatttttagcaccgatgggatttcaccacgttgaccaggctggtcttgaactcctgacctcaagtgacctgccctcctcatgtattccaggtcctgggaatacagctgtgaaccagaaagataagatccctttcctcatggagcttgtattctagaaaatcctgtagacggaatttacttttgggcaaaaataaagcagaactggaatatgagacggggttgtcaggacaggccacactgagaaagtgttattgggcagagacgaggaaaggtgacgagggagcaagccctgtgggtatctgaggaacagcaaactcgaaggccccgaggcatgattgagacgcggtggggagtcccatggggctggagtgacatgtctcatagagaaggggtagaaagtgaggcaagatggagggcacctgtagtgccagctacaggaggcaggaggatcattttggccctggaggttgaggctgtagtgaggcatgattgcgccactgcactccagcctaggcaacagagtgagactctgtctcaaaaaaataaaaaagaagtcgggcgtggtggctcacacctgtaatcccggcactttgggaggccgaggcgggtggatcacctgaggtcgggagtttgagaccagcttgaccaacatggtgaaaccccgtctttcctaaaaataaaaaaaatcagcagggcgtggtgacacacatctgtagtcctagctactcgagaggctaagcaggagaatcgctcgaacccgggaggcagagattgcagtgagccaagatcgcgccaatgcactccagcatgggtgacagtgagactcggtctcaaaaaaaaaaaaaaaaaaaagaaagaaagaggctgggcgcggtggctcacacctgtaatcccagcactttgggaggctgaggagggcagatcacttgaggtcaggagttcgagatcagcctggtcaacgtggtgaaatcccatcggtactaaaaatataaaaattagccagatgtggtggcgcacgcttgtaattgcagctactcaggaggctgaggcaggagaatttcttgaacctagaaagtggccgagattgcgccatcctgggcgacagagcaagactctgtctcaaaaaaaaaaaaaaaaaaaaaaaaaaaaaaaaaaaaaaaaagaaaagaaaaaagaaaaagagacaaagaaagaaaaataaatgaggccagagctatgggaggattttaagtggaggagtgaccgtggggctgttgtgtgacactgctagctttacttgtgtgcctaagtggtcctttctcagaatcttactttcttttcgtataaaatggggcttagcattgccatctgcaggacaagtacaagtcctaataatagctgacatttctggaaggcttgccatgtgtactttttggcatgacatcattgggtcctcatcgcaaacctctgaggttgattctattttcatcctcctctgaaaaatgagtcactgcagtcagagagggaaggccacctgtccctgaccacacagctgatgtcaggcacgtgggtcctaagccttccagggcctgccccctgggtccccatcctccagcctggaggccccagggcacggcttccctgctcacacctcagtttccttgctatcctagaaacctaagggtagctgggcgcggcagctcatgcctgtaattccagcactttgggaggccgaggtggccaattaccagccagaggtcaggagttcgagaccagcctggccaacgtggtgaaaccccgtctctactaaagttacaaaaattagccgggcatggtggcaggtgcctgtaatcccggctactcaggaggctgaggcaggagaattgcttgaacctgagaggcagaggttgcagtgagccaagatcgcaccactgcgctccagcctggacgacagagtaactctgtcaataataataataataataataaataaactgctgggcacagtggctcaagcctctaatcccagtactttgggaggccgaggtgggcagattacctgaggttgggagtttgagaccagcctgaccaacatggagaaaccccgtctctactaaaaatagaaaattagccgggcgcggtggctcatgcctgtaatcccagctactcgggaggctgaggcaggagaattgcttgaacctgggaggcagaggttgcagtgagccgagatcacgccattgcattccagcctgggcaacaagagccaaactccgtctcaaaataaacaaacaaactaactaaagaagcctaacagtaaatggcagctggtgtgtatgtgaccctgttgctctgcttcctccagggacacggccaacacggtgaaggaaaagttcgggaggaagctttatgaatccttactggtgtgagtgccccaccctcagccctgtgccctcctaggccctgactaacccctctcattactccgttctcacatgcatgcccctgcttgccttgcagtgggagccttcccgacatgaacaagatgctggataaggaagacttcactatgatgaagagagccatctttgcaacgcaggtatggattggacctctgtgcagagagatagcagttcctggcagccccagaggcagcttgccaggccagctcagaccccagagattgctgggagtcctgctttctcctgcagccctttatgaagggatctattctgaggtccacagaagggcacgtgctgactcgtgcaacttcagttgctggaggcgaggcacttagggtgggctgttttctgtggcttattctgccacgagggttgctgggacgtgtggtttctctgggattctggggtcaatgagcaaaaggaagcttatttgtttatttatttttattatatttatttatttattttgagatggagtctcgctctgtcgcccaggctggagtgcagtggcacgatctcggctcactgcaacctctgcctcctgggttcaagcaatactcctgccttggcctcccaagtacctgggattacaggcacatgccaccacacccagctaatttatatatttttagtagaaacgagatttcaccatgttggccaggccagtctcaagctcctgacctcaagtgttctgtctgcctcagcctcccaaagtgctgagtttacaagcgtgagtccctgttcccagcccaaagggaagtttaaaaggaagtgtagaaatgtaataaagggccaggtgtggtggctcatgcctgtaatctcagcactttgagaggccaaagcaggaagatcacttgagaccaggaggctgaggctgcagtgagccatgactgtgccactgtacaccagcctgggggacagagccagatcccacactagccccccacccacccccaaaagaaagtcaaggcccagcttggtagctcacacctgtcagtattcccagcactttgggaggctgaggtgggaggatcgcttgagcccaggagtttgagaccagcctgggcaacatgatgaaaccctgtctctaccaaaaatacaaaaatgagctgggcatagtggcatacacctgttatcccagctacctgggaggctgaggccagaggatgccttgagctcaggaggtcaaggctgcagtgagctatgattatgccgctgcagtgagctatgattatgccactgcactccagactgggcaacagagcgaggcggacacatacacacacacacgaaagaaggaaaagaaagaaaagaaaaggtcaagacagccataaaagaattacaactctcagctctccttgggccttgctgcacacggctccacctctacccctaaaactgctgggagtggtagttttatcgggccactttagggacgcagtcaggaggtgagcaaaagcacccagcattctccagaaaacattgcaaactctcagcagctgcggtttcttatttccagaggctgtgtgttggtccccagacacccctgggaattgtagctgctttagatccctaacttcagagagaattggcatttataaaatgagaacttaccgtcattctattgagtctaggggcccaaaaaactacaactcccagcagcccctgctggctttctggggcattgacgcttcccttgtccagaggcttctgggagttagagttctttcattctctggggtccagggacttcagtacttgtggtctacattggggagccatttcctggggaatggaaacccagacagctaagttgtagaaacaaaacgtgaactgcttttggctaacctataatttccaatagtccctaaagcagcccacctcattatgaatgtttctgccatcgggatgctgggagttgtagtttctcgggcccctagactcagtagagtggtggtaagtaaaatctttaatgagctatgatggaacagttgctaagaactatacaccccagcagtcctcaggacttcctatcacactagctctgtcttgctccagagactcttggaaattgtggtttctttgggcctttgttagggttggaggtgaattttcttttttcttcttttttttttttttttttttttttgagacggagtctcgctctgtcgcccaggctggagtgcagtggcgcgatcttggctcacttcaacctccgcctcccggattcatgccgttctcctgccccagcctcctgaggcacccaccaccacgcctggctaattttttgtatttttagtagagacggggtttcaccgtgttagccaggatggtctcgatctcctgacctcgtcatcctcctgcctcggcctcccagagtgctgggattacaggcgtgagccaccacgcctggtggttggaagtgaattttcataaggaaactacaactcccagcagtctccaaagcttgctgccatattggcacagtctccacccccattgactggggatagttatatttcctttgggtttctttaataatagagcccagagtacagaacaaggtagctgcaactcctcatagtccttggaggtaagggagttgctaacacggctttgcctcaaagacagctgggaattctagttctttgaagctcatggtggttaagggaaggaaaacatttccaggccaggtgtggtggctcatgtctgtaatcccagcacttcgggaggccaaaacggatgcatcgcttgagcccatgagttcgagaccaacttggccaacatagtgaaaccccatctctattaaaaaaaaaaaaaaaaaaaattaggctgagcgcaatggctcacgcctgtaatcccagcactttgggaggccaaggcaggtggatcacgaggtcaggagatctagaccatcctgatttaacacagtgaaacctcgtctctactaaaaatacaaaaaattaaccgggcgtggtggtaggcgcctgtagttccagctactcgggaggctgaggcaggagaatggcatgatcctgggaggtggagcttgcagtgagccgagattgtgccactgcattccagcctgggcgacagagcgagactccgcctcaaaaataaataataataatttaaaagaaaagaaagaaaacctttacaggttgtactagtgggaatccacaactcctggtgatcacttgggtttgttgccccacgtccggtgcatttgtggtctccttggctcccccagggtccgcatggctcatgaggaagtagggagttctctgtcccttccatgaccccttacccttcttgtggctcctgcagcggcagtctttcccccctgtgtgcacccacaatatgctggatgactcctcagaccccatcctgaccaccatccgccgaatcggcctcttcaatagcagtgccgacagggtgaaggtgagggcatttggtcagggctgggttgggcacggcagagggaaggggttgggtcctgggcctcacacactccattcccctataagttttatcaaaggtattgctgtggttagaaagaaccctggcttctgaggcaggcagacctgggtttgaacattggtcctgccaaacacatgctgtgtgatgctagacaagctttttaccctctctgggccaccttgggatctcagggcttagctaaataaggcacttgggctgagtccttctttttcactaccaggtgattttccacccggagttcctctcctccacaagccccctgctccctgtggactatgaggagtttgtccgtggctgtcaccttggagtcttcccctcctactatgagccttggggctacacaccgggtgagtgtagtgggcaggggacagcgtggtcatggcatcctagtcagagctagcatgtcttggggcgaggcactggccttctctgagcctgttgccttctttgcaaaacaggaacaatggtaatcacctgttctgctacagcgcgtgcttttgtgatacaatagctcatgtattgagaaactagaagactgggttttgaggactagtgaactggatgtcacagttcacactgctttctcccagaaagcagtggccccccaaatagtggcaatgaaatgcacaattcacaaatacagccgagtgtggccaagtctcctcgtaagacgttcccagtgcccatcaactccaccttcctcttgttggttcacattagccagtgtttttaaagctaaataaggctgggcgtggtggctcatgcctgtaatcccagcacttggggaggccaagatgggcagatcatgaggtcaggagtttgagaccagcctggccaatatagtgaaaccctgtctctactaaaaatacaaaaattagccaggtgtggtggtacgcacctgtagtctcagctacttgggaggctgaggcagagaattgcttgaacttgggaggcggaggttgcagtgagctgagatcatgccactgcactccggcagtgctgtgctctgggtgacagagcgagactccgtctcaaaaaaaaaaaaaaaaaaaaattaaagctaaattagtgccatttcctaatttattagtaatttaacaagtcctgcaaactgtgcttgcatgataattaggagtcgcggtcagccccaattccctttttccataggccttgttttatagatagattgatagatagtactagtctgttttcacaccgctataaaaaaaaaatccaagactgggtaatttataacggaaagaggtgtaattgactcaccgttccacatgtctggagaggcctcagaaaactcagtcatggcagaaggggaagaaagaagcttcttctcatggcggcaggagggagaagtatgtgagggtgcaggaaaaacgaacatttataaaaccatgagatctcgtgagaattcactcactatcatgagaacagcggcgggggaaccacccccgtaatccaatcatttccctccctcgacacgtggggactacattttgagatgaaatttgggggggaacacagagtcaaactatatcataaatatatatttaatacattttactatttgtttcttttttgagatggggttattactctgttgccaaggctcacctggaactcctaggttcaggtgcttctgcctcagcctcttgagtatctgtcattataggtgcatcccaccatgcctgacagatgtattatatttagtgcctatttttgcagtttacagatgtttttaggaaaacttacataagaattatagatcaggccaggcatggtggctcacgcctataatccccacactttgggaggccgaggtgggaggatcacttgaggacatgagtttgagaccagcctggccaacatggtgaaaccctatctctactacaaatacaaaaattagctgggggtggtggcaggcacctgtaatcccagcccttcgggaagttgaggtgggagaatcgtttgaaccccagaggcagagattgcagtgagctgagatcgcgccactgcactccagcctgggcgacagagtcagaccctgtctaaaataataataataataattataggtcaggggcagtggctcacacctataatcctagcatcttggaaggctgaggtgggaggatagcttgagctcaggagttcaagaccagcctggacaacatggtgagaccctgtctctataaaagatttttttttttttttgagacagagtcttgctctattgccaggctggagtgcagtggcacagtcttggctcactgcaaccgcctcccgggttcaagtgattctcctgcctcagcctccagagtagctgggactataggcgcctgccaccacacccagctaatttttgtatttttattagacacagggtttcaccatgttggccaggatggtttttttttttttctcttcttgacctcgtgatccacccgccttggcctcccaaagtgctgggattacagacatgagccaccgtgcccggccttttttttttttatttttaattagccatgcgtagtgttgtgtgctcgtagtcccagcctcttgggtggctgaggtgggaggattgcttgagcctaggaggtcaaggctgcagtgagctatgatcaagccactgtcctccaggttgggtgataaagtgagaccttgtctcgagaaaaaaaaaaaaaaagcattgggccaggcgcagtggctcacacctataatttgaccactttgggaagccaagacggatggatcacctgaggtcaggagttcaagacctgcctggccaacatggtgaaaccctgtctatactaaaaaatacaataattaactgggcatggtggtgtgtgcctgtagtcccagctactcgggtggctaaggcacgaaaatcgcttgaacccgggaggtgaaggttgcagtgagccgagattgtgccactgcactacagcttgggtgacagagtgagaccctgtctcgaaagaaaaaaaaaaaagcataaaaatccatcaaaaaattataatacattccttgaactatttctcaaggttgttaaaggtattaaacaagacgtactagatgctctgtacacagggatactaataatgagagaccttatcttaccccccatcaaaatagactaagtccgtacaagatactggcacaagaaaggatcttacaggttgtgacaattaagtagaatgatggaccttggcccgatcctacaggttgtgagagttaagtcaaatggatattgggatgctcaataaattagcatccttatctcccaactatggactttcccgcatcttggagcaagagcaagtaattctcttttctgagcctcttagcgtcccctctgagaaatagggaaatgcacagcctggttgtgggggctcagcgacgctccgcacagcgcctggcacttggtacaggcgccagtagagggcggtgttgaggcgtctattgcgattaagacggtaggcgatgagggaagctaagtgggtctctctcctgccttcccgcagctgagtgcacggttatgggaatccccagtatctccaccaatctctccggcttcggctgcttcatggaggaacacatcgcagacccctcagcttacggtcagcgcccaggcccctgaggattctggaagggggcttgagaacagtgactcctggatcctgggaaggaggagcttgcacccttggagaccaggggcaccaggaaatgggggggctctcgggccgctgggagaggaggggtcctggtgccacagagtcctggagaccatgaagatctccccaggatgttttctgaacctgggtcctggcctccacaggtatctacattcttgaccggcggttccgcagcctggatgattcctgctcgcagctcacctccttcctctacagtttctgtcagcagagccggcggcagcgtatcatccagcggaaccgcacggagcgcctctccgaccttctggactggaaatacctaggccgggtaggacccccactttcctatcctctcctggcaaatcagcagctcctggctaggggtctttggtgcagggtgcagggtctcatcctacttgtaacagttgctgtccctttaagcaatgaaccaggccgatcgcgatggtggctcatggttgtaatcccagcactttgggaggcctaacaggaaggatcgcatgagctcaggagttaagagaccagcctgggcaacattttatttttactaaaaataaaaaaaaatcagccgagcgtgatggtgcgtgcctgtagtcccagctactggggaggctgaggtggtagggtcgcttgagccccggaggttgaggctgcagtgagccttgttcaaacccactgcactccatcctagagtaacagaacaagaccgtgtttaaaaagaaaaaaagaacattggtcaggcgttctcatttgcataagggtgtggccaaagaggagactcacttgagaattcggcccctgtttgaggggtatggctcagaaactgtccattcacaggtctgcttatctacataaggggtggagtcagatagatggattatttgtatggggtgcagcagtgtgctcatctgcataaagggtgtggccaagacccccatcatctgcctgggggtggggcctggctctcacatcctctgccccctctcctcctttcccctagtactatatgtctgcgcgccacatggcgctgtccaaggcctttccagagcacttcacctacgagcccaacgaggcggatgcggtgagtggaccctggatttctgcttagccaggagctaaagggctgggcttcggtggggtgggggtccctcctggagtgggaaggcctagaggtggctggatgcctgggtgggactgtgaggtcctcagctcaccctggtttgcacccacatcgccgtatgcaggcccaggggtaccgctacccacggccagcctcggtgccaccgtcgccctcgctgtcacgacactccagcccgcaccagagtgaggacgaggaggatccccggaacgggccgctggaggaagacggcgagcgctacgatgaggacgaggaggccgccaaggaccggcgcaacatccgtgcaccagagtggccgcgccgagcgtcctgcacctcctccaccagcggcagcaagcgcaactctgtggacacggccacctccagctcactcagcaccccgagcgagcccctcagccccaccagctccctgggcgaggagcgtaactaagtccgccccaccacactccccgcctgtcctgcctctctgctccagagagaggatgcagaggggtgctgctcctaaacccccgctccagatctgcactgggtgtggccccgcagtgcccccacccagtccgccaaacactccaccccctccagctccagtttccaagttcctgcactccagaatccacaaagccgtgcctttctctggctccagaatatgcataatcagcgccctggagtcccctgggcctggaccgcttcccagaggccaggaatctgccattactctgcggtggtgccagaggttttaggaaacctggcatggtgctttcaggtctggggcttttagagccccccgtgtggcttacaaattctacagcatacagagcaggccacgctcaggcccggcatgcgggccaccaagttctggaaaccacgtggtgtccctgcgaatggggcgatcaagtccagagccggggcactttcagagtttgaaggtaactgagagcagatggtcctccatttcaactccagaagtggggctctgggagggatgttctagccctccctggcatgtcagagccaggctctgcctggaggatccctccatccggctcctgtcatcccctacactttggccaagcaagaggtggtagaaccacttggctgctcattccttctggaggacacacagtctcagtccagatgccttcctgtctttctggccctttctggaccagatcctactcttcctttctaaatctgagatctccctccagggaatccgcctgcagaggacagagctggctgtcttcccccacccctaacctggcttattcccaactgctctgcccactgtgaaaccactaggttctaggtcctggcttctagatctggaaccttaccacgttactgcatactgatccctttcccatgatccagaactgaggtcactgggttctagaacccccacatttacctcgaggctcttccatccccaaactgtgccctgccttcagctttggtgaaagggagggcccctcatgtgtgctgtgctgtgtctgcaccgcttggtttgcagttgagaggggagggcaggaggggtgtgattggagtgtgtccggagatgagatgaaaaaaatacatctatatttaagaatcccaggtgtggtcagacatgacacttggtgggcctggctgtgacgtccccccagtaccaccccttccctggtctgagctcatcctcttattctagagagacttggggggtctccctatgttgcttaggctggtctcaacctcctgggctcaagtgatcgtcctgccttggcctcccaaagtgctgggattacaggcttgaaccaccctgccccagacccaggggaaggagaaggggaagagtcagagctgacacagcagttttgcagcttggacacagcaagtgctttttaaggcctgttttaagcttcttcagttcccatttggagaatccggcccaaggtttcacatcccatttctgtgatgaaccctaaaccccttgtccagcattgcttgggcatcacgtgttcctggctgctcagctccactggccagttcctctcagtgtgcgcctcacattgggatcactcaagctcgggccataatctcttaaactctggagcaaagacctcagtgagccccccggttgccatgcaagttgcatagcaatagcgtcaatgtgcccatataaagggcctaataattccaactgcctcccagaattgaggcttttttcttttttgagacagagtcttactctgttgcccaagctggagcacagtggcgccatctcagctcaccgcaacttccgtgaggcagacatgttttttgtttgagatgggagttccactctttttgcccaggctggagtgcaatgacgccatctcagctcactgcaacctccgcctcccagattcaagcgattctcctacctcaacctcctgactagctgggattacaggtatgagccaccacacccagctaattttgtattttagtagagacggggtttcttcatgttggtcaggctggtctcgaactcctgacatcaggtgagcgacccacctggccccataatcactcgttaaatagggctgtttctggctgagacctaacatctgtttctagataccaacctaggtcttaattcaactccctggagtctatctctaccatctgggagggacagttaacagccaggcaagcagagaaccctcaggttcaacactacccagatagcctcttgtcttaggacagttaagaaaatgggagatggggccaactcctctttcactggcatcccaacccagccagaagctttatgagaacagatcccacctcatcttccacaccacacacaaaaccaccagctgcatcaaaaagctttatttccatttggtccaaggcttgttaggatagttaagaaagctgcctattggctggagggagaggcttaggcagaagccctattactttgcaaggggcccttcagaagtcgctgggctcagaaggctcttagtcgtgcttgagagtgagcctttcgaagagatactcgcccagcccagcctccgggccacccagcctgtggaggttggtcaggtggtcacccatcttcttgataagcttcacttcctcatctaggaagtgagtctccaggaagtcacagagctgagagagaagagggagaaattagaaacccaatccctggaaaagagggggagagagcagccagttgcagattaaaatgtgacaggtgtgaaatgaggctctgaaggaaatttgcccaaagggagcagaggcttgaggggtatggttgggtagccatggatgcagcgggtacgtacatgggggtccgtgcgggcagaacccagggcatgaagatccaaaagggcctggttcagctttttctccagggccatggcagctttcatggcgtctggggttttaccccactcatcttcagctggcttctatatagaagggagaaatggctcagaatacacacactcggcacatagaactaaacctacatttcccaagagtcgttgggggtcagaggcccaggccacaaagacatgtgacagcttgtatttatcactctccgcaccctgtcctagctcttacagctatacgtccctaagaccacgcagcggtgtggactgccgcgtgttgtgggcactgcacgaggtgcgcctctatttccagcggttaagagggctcacaagaccgaactcaatctcccagaagcccacgcgacacctacgccctcaaatcaaggctcctcgcgcgcacggcctgctgggagatgtagtccattacccacacactagttaccttgatgtcctggaagagagcgcggccgccacgctggttttgcatcttcaggagacgctcgtagccctcgcgcttctcctcggccaattcgcggaagaagtggctcacgccttccagagccacatcatcgcggtcgaaatagaagccctacgggaagagatggaggcaacaatggttagcgggaggcgaggccaaggggactccgccctctgtttacccgaccgcacaaagaaggctggcgcgtgcagtgagggccggaggtgcgcagctggaggaaattagggccaggggcgtcctggggactcaccagagagaggtaggtgtaggaggcctgcaggtacaaattgaccaggctgttgacggctgcctccacgtcggtggaataattctgacgaatctgggagctcatggttggttggcaagaaggagctaaccacaaaaacggtgctggcaggtcccagaagcaggagatggccgagaagatggtcccggaggttgcaagcggagaggaaatcggagggcggtcggaggctggaagagagtccccggatctgttccgtccaaacactgttgaagcaagagacagacccgcgggaccgccgaactgcgaggggacgtggctagggcggcttcttttatggtgcgccggccctcggaggcagggcgctcggggagggctagcggccaatctgcggtggcaggaggcggggccgaaggccgtgcctgaccaatccggagcacataggagtctcagccccccgccccaaagcaaggggaagtcacgcgcctgtagcgccagcgtgttgtgaaatgggggcttgggggggttggggccctggggctgattctggaaatgcaggggttcgtgggcgggagggtgggggctggggtccctctgggaggctagagttttatg

SEQ ID NO: 3 - DNA, 31000 bp, Homo sapiens; identical to SEQ ID NO: 2
  source 1..31000: mol_type = genomic DNA

SEQ ID NO: 4 - DNA, 32229 bp, Homo sapiens
  source 1..32229: mol_type = genomic DNA
ggcatggagctggacatgctctggcccctgctaatttcccagcatcccttgtaccaggcggccccagttctcaaccaccaggccttgcacatgctggcccctgagtccagactgctctccctgccctctcactgaattagatcaagtgctgccccctaggggaggccctttctgtccaacagccctgccaggctagttctaggacctctagacattcagacagatgaaaggcctccctgggagcccgatctccctgtgtgatctcacattcccgagggagatggatggatcaatattctctgctccagtggacatgagtcccatgaagggcacggcctgttctctcttgttcacctcgggactcaatgtctgtggtttgctaagtgatactctaaagtgctgagctcattcaacaagaatataccgaggcttcccatgttgacagttctccacagagaggagccagctaccaccccttctcacatgggggagggaggtgagtaaacaccacccgggacaattcaggacccccccagaggtccacacaaaacatggacacgagtgttcacggcagcactattcacaacagccaaaagatagaaacaacccacatgtccatcagctgatgaatggcaaaataaaacagggtctatttgtgcaaaggaatattattcagtcataaaaaggaatggagttcttttttcttttcttttttttttttttttgagacatagtctcactctgtcacctaggctggagtgcaatggcgcaatcttggctcactacaacctctgcttcctgggttcaagtgattcttctgcctcagcctcccgagtagctgggattacaggtgtccgccaccacacctggctaatatttttttgtattttttagtagagatggggtttcaccatgttggccaggctggtcttgaactcctgacctcaggtgatccacctgccttggcaccccaaagcgttggggttataggcgtgagccaccgcgcccggccaggaatggagttctgatacatgctacaacgtggatgaactttgaaaacattatactgactgaaagaagccacacacgaaagacacatatggtatgattccatctatatgaagtagccacaataggcaaatccatatacagagaaagattagtggctgcctagaactgaagatgggaggtatggaaggattagcggtgacaggtaagaggcatggggtttctttttggggtgacgacaatgttctaaaattgactgtggaaatggctgcacaagtctgtgaatatactagaaaacactgagctgtatactttaaatgggtgaattatgtagtacgtgaattctatctcaataaagctattaagaaaaaaaaaaaacaacaggctgggcgtagtggctcccacctgtaataccagcactttgggaggctgaagcaggcaaatcacttgaggtcaggggttcgagaccagcctggccaacatggtgaaaccctgtctctactaaaaatacaaaaattaggtcaggcacggtggctcacgcccgtaatcccagcactttgggaggtcaaggcaggtggatcacttgaggtcaggagttcgagactagcctggccaacatggtgaaacccagtctacactaaaaatacaaaaaattagccaggcgtggtggcaggtgcctgtaatcccaggtacttgggaggctgaggcaggagaattgcttgaacccaggaggcggaggttgtagcgagcagagatcgcgccactgcactccagcctgggcatcagagcaagactctatcactaacacacacacacacacacacacacacacacacacacacagatacaaaaattagctgggcgtggtgacgcgcacctgtagtcccagctactcaggaggctgaggcaggaggatcatttgaacatgggagagaggcagaggctgcagggagccaagatcacaccactgcactccagcctgggagacagagtgagactctgtcttgaaaaaaagaaaaaacaaaaaaacaatcctggatggtggatctttgcatgtctgttacattattttctgacactttggaatagttcataatttctaataaggaaaaggaagcctaagaagctagcatgctaaccgaggccacccatccccaggtctccttccttcccacaggtttgtgtttttttttttgagataagatctcattttgtcccccaggctggactgctgtggcctccacctcccaggctcaagcaatcctcccaccttagtctcccaagtagttgggactacaggtgtgtcccaccacacttggctaattttcttctcttttcttttcttttttttttttttttgagacacagccttactctgtcacccaggctggagtgcagtggcgcgatctcggctcactgcaaccttcgcctcccgggttcaagcaattctcctgcctcagcctccagagtagttgggactacaggcatgtgccaccacgcccggctaattttttttgtatttttaataaagacggggtttcaccatattagccaggctgctctcaaactcctgacctcatgacctgcccgcctcgaccccccaaagtgctgggattacaggtgtgagccaccgcacccggcctaattttcttatttttttgtagagacagggtttcgctatgttgccagggctagtcttaaattcctgggctcaagcaatccttctacctcggactcccaaagtgtgggattacaggcgtgagccactgtgcccagcccacaggtctttcttctcttcttcccctagagaggacatgcagttatccagcccagaggaagcctcctccctctggagccaatcgtttagactttctggccatcaatggtcacaagctttccctgtcactgtgtgaaccttcccacctaccgtctcctataggaagctggaacccaggagcatagaacattacccccagactacaagcagaagactaggcatccccaccccacaaaaaagacatgaatccaggaatcccaaatgtagctctctcaacataaacaggccccttaccaaggactgtctcctataaagactttctctttcatcataagtctctccaaaaccttgctgcccgctgttcccatgaaaaccaaggtcatttcaaaactcagcacacaccgtcccctcatacttccaatactttctccacggtagttctggtcatagccttcctcttctacttccctatccacctcctcctcctccttgccctggtgacagcaacagactcaaatctcatccccagctaccaacaactttctccccctcccttcctccatcttgactgggctcatcatggaaattgaggcacctgtaagcccagcccagtccctaagttcaggtcacattacctttttttttttggagacagagtctcgctttgtcgcccaggctggaatgcagtggcgcgatcttggctcactgcaacttctgcctcccaggttcaagcgattctcctgcctcagccttctgagtagctgggattacaggcctgcaccaccacacctggctaatttttgtatttttaatagagacggggtttcgcaatgttggccacgaactcctgacctgaagtgatccgcccgcctcggcctcccaaagtgctgggattacaggcatgagccaccacgccaggccaaaatcgcttctttattcaggtaattgagcaggtgccaggccaagtttcctggcctctccttcattcacatgtattcattcattcaaatattcaagtgataatttattgagcatttacactgagacgtagcccgtgtgaaatactggaaatatgaaaatggccaaaacggtagcatgacaagatcccgatttctgggtccctaatccttcagtcctctccactaagactctcttgttcctcgacaatttcttcccactaaaggctcactaggcgccctcgcgctctcagacacactgaacaggtacctgcctgtgcttccagcttggaactcaagtgccattggcaccactaacaatccaaggctcccaaatggctcgaagcgcaaggtcctacaaccctcctcatcacacactggcgccaaggactgcggaaccggccgttgcgccaagatgattttgaaagttggagttcctatagcatgatggggccagacccgagattctgggatcccagccccctccccgcctcagatccagaagtccagcccccatgtccccttctcccccagatctgggtggccgagcttcctcctctttcagacccaggagtctgaacccccagatcccccctccctcagacccaggagtcagggcctccagcatcctcctctctcaaactcgagactgctagctcgctcctcaccctccatgcacccacacttacaacggttgccatgatgctcaccaactgccagagtcctagcggaaacggaaacgcgcgaggagcgagatgttctggctcctctaggctagctggttcttcaaagatctcgatggttcctcataaatatgtaaatattgtgggggcgtggcgggactttatgccccgccctcccaccgaggctgcgctggaagacgggcgtccggaactcctgggtccattcccaatgtctcctggctcctcctccttttgctcagccccaccaccgccccgctcaggccgattgcaaaattcttagctgttctttgagtaaccacacgtcctccacgctcctttcctctttatcccaccctcctcctcctccccactttgaggcctccagctccagattgacagagctgaaggccactcgtttccgtaaagcgcagcggcaagctccgccccctggaggtctcacggccgaggcggggccgggacacagcgactccaacccgttccaccaatgaggacacgcggaaatccccgcccccgggcgtgggccaatggcgctggctggggggggcggccaccgcctcctggcggctgcgaggtttcactgcaggggcgccagtgggctcagtgacgctgcggcctccttctgcctaggtcccaacgcttcggggcaggggtgcggtcttgcaataggaagccgagcgtcttgcaagcttcccgtcgggcaccagctactcggccccgcaccctacctggtgcattccctagacacctccggggtccctacctggagatccccggagccccccttcctgcgccagccatgcctttaaaccgcactttgtccatgtcctcactgccaggactggaggactgggaggatgaattcgacctggagaacgcagtgctcttcgaagtggcctgggaggtggctaacaagggtgagcacgccaggcgtcggggcccttgacgagaaggacagtagtggatgggggcccggaactctgagttgtaggaggacggggctactaggggaacccttgtgacctgggcaaggaggctgtgtccttgaggaggggctgggaagccggaggtgggtgggagagggatggttcgtttgacttaagatgaaaggaggctggaagcccgggttctgggtcctagggaagagggcgctaaaatgagactcctaggtcctggaggcaggcttccgagagactagatacctgggtcctgaacagggaaggggatggggggatgggatttctgcgtgcaaacctgggaagctgccggggtttcagacctatgaccctaacagcatggtctaggggataaaactccagatttgagagagagctgactgggagataggaggcctgagcggcggtgggaggacctgaggatctggctgcttaagaataaagatgggacgggctggagactgtaatgaatgcctgggctttgaaggagctgagggcctgagctattagttcctaggagtagaggagcccatggcctgggacacatgcgtactggaataggggaaggctgggaagtcctaagttagtcagaggctgggccctaggatgggaggggctaggagcctgcatttctgtgtcttgggcttcagaaagctgaggttctggccttggagaaggctggggctgaaatccccaggaacaagccaatctcacacctcaaagagcagggtctggggggttgctttgctgggtcttggaggagaaagggactgtgtctcccaggaggagagggggcccgtgaacacccagccgggtatcgccagggcctgggctccaggatgggaggaggctgggggctggggctcctgggtctgggatagggtcatgggagaggcagagccctgcatgctggtgtccctagtcagggagaggaaattgggaggcaggtcagcaaggtccctgggggcagggaatgaccatgcaggcttctcttgggcaatggtgagaagctggattggccatgagggggtctccctcactgggttttggagcctggctgcgatttaaacccagctcctgtgagctgggaactcgggaacctgagtccgggtagtcagtcctcagctctgccatccttagagccccagtgcctaattccttcagaccaaggggtcccggcacccagccccttctctctcagacccagaagtctagcctgagccccctcctccttcagggtcctgaccccagcccccttctcccttagacccaggaggactgccctccagccctcgtgttcccctcatccaagcttccaacccctactccaaactatgggctcccagtcccctcttccccctgagctagaggtctggggcctgagtgccccctacatccccggcccaccccaccccaggccccagaactatggacctcggccggggcctgccctcacacgcttgggcccacagtgggtggcatctacacggtgctgcagacgaaggcgaaggtgacaggggacgaatggggcgacaactacttcctggtggggccgtacacggagcagggcgtgaggacccaggtggaactgctggaggcccccaccccggccctgaagaggacactggattccatgaacagcaagggctgcaaggtgggacgtggcccagcccagggcagaagcgggtggacagcctgccatcggggtgggagccacagacggagagggtgcagggtggacagccccagccagagagcgaggcaggcttggacacaggaaggaggcgtgataggacacccagacagatgcagggcctggaagtgggtgggtggatcccagacatgggcgaatggacagacagatggcaagtatgagacagactgagacggagatccaagaggccaaggtcctcagacccagagagaaagagagcaagatcgaaagacagcctggtcaacatggcgaaaccccgtctctaccaaaaatacaaaaattagctgggtgtggtggcgggtgcctgtaatcccagctactcgggaggctgaggcaggagaatcgcttgaacccgggaggcggaggttgcagtgagctgcgattgggccactgcactccagcctgggcgacggagcgagactctgtctcagaaaagaatgccagccagccaggcagagctggggagaagtgggcctgaggtcaggaaggagcaggattctggagcttgaagttcaagttcaccctccacttgctgcctgtgtgtccttggctaatggacatgctaatagcgtctaccttctagcggtgctgggaggaggaaacagttaataaggacaaagtggttagtagagttcttggcatgaaggtagcacattgtgtgggcggtgattgtcattgttatgatcatcgtcattattgttactaacagccaagcttggagagtgagggggacaggcagaccaagggagaagggtggatggagccacaggcaagagtaatagactggggacagaagagaggccaccagatgtttcagaaagccagtcctagaaggagagagaagcatggaatatcggggaagagaggagaggtcagtggacagacccacaggacagagtctgagatgggcagatcagggattagagaggagggggagttccagggccccagggtgaagacggaaagagacacgctgttgtccaaggagaaagccatcaggcggcacgctgttgtccaaggagaaagccatcaggcggcagggctaagggacagacaggtccaggctggggatggagaggcactgtggttcctttactcattcacagcctctggtttggggtggggtctggaatccattcaggtccgactgtgtccctaagggaacccagaacagcccagtcgcttcctgagggcagctgcttcccacgtgctgggggcctaagaatagcccccccccccccccagcaaaagggcagacaacagctgggagggggagggacctcagagcgaggctccaggcagcaaaaagccaggtcggcgaggagcggggctgcttctccactgctgtggcagcaggcccagaaccaaagccatggtctcagggaggaaaacagccaactggagaaatgtggcagaggcagaagtgagacagcaagtcttagaaacacggcagtggctagaaaaatgcagccctggggcacggacagaggatgggctatgttagaaatgtgtggcgtggccgagggcggtggctcatgcctggaatcccagcactttgggaggccgaggtgagaggatagcttgagcccaggagttcctgacccacctgggcaacatggcgaaactctgtctctactaaaaatacaaaaaattagccaggcatgatggtgcgtgctcgtgatcccagttactcaggaggctgaggtgggaggatgggatgtggaggctgtagtgagccataattttttttttttttttttcagatagaatctcactctgtcgctgagtctggagtgcagtggtacaatctcgactcactgcaacctccgcctcccgcgttcaagcaattctcctgcctcggcctcccaagtagctgggacctcaggcacatgctgccacgcccggctaattttttgtattttagtagagacagggtttcaccatgttgcccaggctggtctcaaactcctgagctcaggcaatccgcccgcctcggccccccaaagagctaggattacaggcgtgagccaccgcgcccagcccagtgagccatgattgcaccactgcactccagcctgggtgaccggagtgagaccctgtcaaaaacaaaaacaaacaaaaaaaaatggaagaaagaaagaaaaaggagagagggagggaaggagggagagagggaaggaaggaaggaaggaagcaaggaaggaaggaaggaggctgtggactacaaaatgggcctatggatagaggaaagaggtcgcaggtgacagatatgtgatgaaaggaacagaaacaaggcatcatggggaagaaaagtggcagcatgaacagtaagagaatcattacaggctgggtgcagtagctcacgcctgtaatcccagcactttggtaggctgaggccaggagtttgagaccagcctgggcaacatggtgaaaccctgtccttacaaaaaagttaaaaattagccgggatgtgataccttgtgcctgtggtcccagctacgtgggaagctgcggtggaaggattgcttgagcctgggagatcgaagcttcagtgaaccgtaattgcaccactcccttccaggctggaggacagagcaagaccccgtctctgaaaataaaaaagggcctgctttaggtggctcacacttctaatctcaacactttgggaggctaagcaagaaaactgcttgaacgcaggagttcacgatcagcctgggcaacatagtgagaccccatctccacaaaaaattaaaaaatcagcctggcatggtggcccacgcctgtaggaggtgaggtgggaggattgactgagccagggaggttgaggctatagtgaaccatgttcacaccactgcactccagcctgggcaacagagcgagaccctgtctgaaaacaaaaaagaagcatcccgtggaaggaattagcatcagaaagaaaagacagtgggagatgcagatggttggtaagagaaatgtggcagcaagtacagaaacaaggcagcaggtaggggaaatgatttgcagagtggccagacagggcagtgggggcatagacacaggacatgtgacatatgtggttataagcagagaaaggaggcagcgagtgggagaagggtagcagttacaggaattaaacaggaggctgggtgcggtggctcacgcctgtaatcccagcactttgggacgccgaggcgggcggatcacaaggtcgggaaatggagatcatcctggctaacacagtgaaacctcgtctctactgaaaatacaaaaaaaagtagccgggcgtggtggcgggccgctgtagtcccagctactcgggaggctgaggcaggagaatggtgtgaacccaggaggcagaggttgcagtgagccgagatcatgccacggcactccagcctgggcaacagagccagactccgtctcaagaaaaaaaaaaaattagccaggtgtgggagcgggtgcctgtaatcccagctacttgggaggctgaggcaggagaattgcttgaacccgggagacagaggttgcagtgagctgagatcgcaccactgcactccagcctgggccacagagtgagactccatctcaaaaaaaagaaagaaagaaagtaagcagggggcacggaaaatattgcaacagagatggaaaaaatgtgtagcaggaataaatcatgcaaatagagaagtaaggctaaggcagcaggtgagaaattagcagcagatatggaaacagaagataagagagctgaggcttaagtctatagacatctgcctgcaaatgggagaaccacggatgagtgaagatatgaggctgaagcccagagcctccctatggtgcctccccaaccccatcccaggtgtatttcgggcgctggctgatcgagggaggccctctggtggtgctcctggacgtgggtgcctcagcttgggccctggagcgctggaagggagagctctgggatacctgcaacatcggagtgccgtggtacgaccgcgaggccaacgacgctgtcctctttggctttctgaccacctggttcctgggtgaggtaggccccgtctgacacattccacccatacctgaaactacaatgaccatcagcccctgggccagaggatgggcttctccctgggcattctgggagtcatagggtcctttaatccaaggattagctctggcctttgaggacatgaacatccaagggcccaggctctactctcgatgccaacttcatttactctagtcttccaagcatagggattcttggaatcagcctcaaagtgaggctggcgggcttgcccgaggaattctaggagttgtagttctctagtgtgatattgctggactcagctctcagatgctgccctggatgctcatgaatccccagcctgacctggttttgacccccttctaggttttaagaggctcaagaagcttagtttccaggctgggcacggtggctcatgcctgtaatcccagcactttgggaggccgatgggggaagatcacgtgaggccaggagttcaagatggccaaacctcgtctttactaaacatacaaaaaaattagctgggtgtggtggtgggcacctgtaatcccaaatcccagctacttgggaggctgagacaggagaattgcttgaacctgggaggcgggaattgcagtgagctgagattgcatcacggcactccagcctgggccacagagtgagacactgtctcaaaaaaaaaaagaaaaagaaaaaaaaaaaaagaagcttaatttctcatgccctgggacaaataattgaggaactggctgctcctatggcattctgggagttgtagtccctttgccaatgttgggtgcagacagcgtacccttgagacaaggggtctttggaaactatgtccaggacctgggaacatgaaaacttcagtctgtccaatctaaccctgccaggacttagatggttggccaaaaaatcctcagttcctgtcaacccctgaggaggcagtcacttgagcccaggagttcaagaccagcctgggctgcctcagggatttacaggtccctgtccggttgggattgctgcagtgggccgctgcccactctgtgcagtagtggtgacagattgacctctccccgagtccttgtccctactggggattgccgattcttttcccaacactcgtggagacagtggccctgtccctgttgcccacagttcctggcacagagtgaggagaagccacatgtggttgctcacttccatgagtggttggcaggcgttggactctgcctgtgtcgtgcccggcgactgcctgtagcaaccatcttcaccacccatgccacgctgctggggcgctacctgtgtgccggtgccgtggacttctacaacaacctggagaacgtgagctgggaccgtggcagatgggggactgcgagtatgccaggaaaacccaaagctctggggggcccaaggggatggcaccccctcttctcccaggatccaggagtccaagtccccagacccctcctacctcagacccaggaatccagcccccagcaccaatttctcttgggaccccagtgtctggacctccagagtcttctccccaatccttctaaccggactgctgtcccctcccacccagttcaacgtggacaaggaagcaggggagaggcagatctaccaccgatactgcatggaaagggcggcagcccactgcgctcacgtcttcactactgtgtcccagatcaccgccatcgaggcacagcacttgctcaagaggaaaccaggtaggggctgggctgaagtccccagacgtgaatgaggtaggcagctgtctatgccaaagccagttgctcctcagcccaagaagcccactgtaagttgaaatagcataaaccgaaaacgtatttcggctgggcatggtggctcacacctgtaatctcagcactttgagaggccaaggcaggagaaccacttgagcccgggaatttgagaccagcctgggcaacatggcgaatccctgtctaaaatattcgccagacatggtgtgtgcctgtatccctagctactcaggaggctgaggtgggaggattgctcgagcctaggaggtcaagggtgcagtgagctgtgatcgtgccattgcatgatttgggtggcctggagagaccctgtcacagcctgggtgacacagtgagaccctgtctcaaaaaataaaaaaatgcatttaatacacctaacctactgaacatcatagcttaggctagtataccttaaatgtgcccagaacactttatgttagcctacgactgggcaaaatcatccaatacaaatctgttttattttatttttatttatttatttatttttgagacggagtctcgctctgtcgcccaggctggagtgcagtggcgctatcttggctcactgtaagctccgcctcccaggttcatgccattctcctgcctcagcctcccaagtagctgggactatacgcgcctgccaccacgcctggctaattttaatacaaacctattttataataaagtgttgaataggctgggcgcagtggctcacacctgtaatcccaacactttgggaggccaaggcgggcagatcacgaggtcaggagatcgagaccagcctggccaacatggcgaaactccatctctactaaaaatacaaaaattagccgggcgtggtggtgggtgcctgtaatcccagctactcgggaggctgaggcaggagaatcacttgaacccaggaggcggaggttgcagtgggccgagatcacaccactgcactccagcctggacaacagagcgagactccatctcaaaaaattaaaaaaaaaaagtgttgaatatctcatcaaaatccaaaattggactcatgtggatgtatgtaactttcacaccatcataaggttgaaaaatcataacttggctgggcacggtggcttacacctgtaatcccagcactttggaaggctgaggtgggcagatcacctgaggtcatgtgctcaagaccagcctggccaacattgtgagaccccctctctgccaaaaatacaaaaattaggtgggcatggtggcaggcgcctgtaatcccagccacccagctactcgggaggctgaggcaggagaatctcttgaacccaggaggcagaggttgtcgtgagccaagattgtgccattgcactccagcctgggcaacaagagcgaaactctgtctcgaaaagaaaaatcataacttggaccatcctaagtcctaagctggggaccatcagttaccatttttttacctaaagaatagagaactacagctcccagaaggctgtgggggtggtgacctgtatttgaggctctctgactatatactctggaggctaatgggaggtataatttctttcatattaatttcagatatgataaaattctgtaattggctaatgtagattggtcttatgaaagggaatggaagatcagtggactttgcttttgagaaaggttaggtcagaactgggcattcttcccagcccttagtatccgttctcagtgagtataaggtgagaactacaactcccagaaggcctttgactggttagctctatatgttccagaactttgccctaggcgctgatgggggttgtagtttttcgttgatatactttaatttctatgaggagaagaaatgattgggtccctgtaagaagcttggaagtagaggatatatcctaggagaagcaggactttggggatgtttaatcatttccatctcagggtgggctaagaggaaacaaaagaagtacaactttcccagaatcaccagtgtggatcagatccctgttagccatttgcagtagctgaggagacttatacttgtgcttgtgaacctaagcaagtaatattaggcaagaaggcatcttggagtcagggtaggtgtgtcaccaagggaactggccaggcatggtggctcacacctgtaatcccagcactttaggaggccagggcaggaagactgcttgaagccaggagtttgagatcagcttgggtaacatgacaagaccccatcactacaaaagtaaaataaataaattagccgggtgtggtagtgcacgcctgtagtgccagctactcgggaggctgaggagggaggattgcttgagcccaggaggtcagggatgcaatgagctgtgattgtgccactgctctccagcctgagcgacagagagaaaccctgtctccaaaaacaaacaaacaaacaaaaaaggtgggaggggggacctcataggaacgctcttgaaacaaaaaaattgcaaaaggcaaagggtgttttcttcatttattcattcaaccacaacattgatctgaatgaacaaataaaacatgggaccctcacccccaatcccagatattgtgacccccaatgggctgaatgtgaagaagttttctgccatgcatgagttccagaacctccatgctcagagcaaggctcgaatccaggagtttgtgcggggccatttttatgggtacgtggggcatatacctaggtcttaagagaggagggcgttgggagcctaaccatctaggtctgggggagggggcagctgggggcccagactcctgggtctgagggagggggcacctgggtattcggcctccttaattcttgagcgctggaacaatgggctcaggattaaaggaaatctccatctaaagagaagaactacaactcccaggaggccccgtgatgcctctgtattacctaagacatcctctgcccccccacccatagcttctgggatttgtagttttgaggccagggctagcgggtgagggctttgggctttaccgtgccttgtgggttctttaggcatctggacttcaacttggacaagaccttatacttctttatcgccggccgctatgagttctccaacaagggtgctgacgtcttcctggaggcattggctcggctcaactatctgctcagagtgaggcctgggctatgaggggacagggagggcaagcaaagcagtttataactagggagaacagccaggcacagtggctcacacctgtaatcccaacacttttggaggccaaggcgggaggatcacttgagcccaggagatggagaccagcctgggcaacatggtgaaaccccatctctacaaaaaatacaaaaattagccaggcatggtggctcacacgtgtagtcccagctactcgggagggtgaacggggaggatcacgcgagcccgggaggtggaggttgcagtgagccaagatcatatcactgcactccagcctgggcgacagaaaaagacgctgtctcaaaaacaaaacaaaacaaaacaaaacaaaaaattacagaacagaaacccaagaagccaggaagatgggggtaggaaagcccctgagtatggtggggggccgtgaggggagtatagagacccagaaagaaggtcagagtccaggtggggactgtcctataattctccttgacaggaatgggtatggcaggatcccagtggtcttgacagaaaggctggctggttccaggcttcccccacatgatcctggcctccccctcctttctttctgcgcaggtgaacggcagcgagcagacagtggttgccttcttcatcatgccagcgcggaccaacaatttcaacgtggaaaccctcaaaggccaagctgtgcgcaaacagctttggttagcagccctcgctccggcccctggcgcagcccactcccagatgcatgctttgggtcctgtgtttctcctagagtctcagttttttgttttgtttgtttgtttgtttgtttgtttttgagacagtctcactctgtcgcccaggctggagtgtagtggtgcgatcttggctcactgcaacctccacctcctgggttcaagcaagtcatctgcctcagcctctcgagtagctgggactacaggtgcacaccaccatgcctggctaatttttgtattttcagtagagatggggtttcaccacattggccagactagtctcaaactcctgatctcgtgatctgcccgcctcagcctcccaaagtgctggaattacaggcatgagccaccgcacccggccctcttttttttttttattttgagatggagttttgctctgtcgcccaagctggagtgcaatggcatgatctcggctcactgcaacctctgcctcctgggttcaagcgattttcctgcctcagcctctgagtagctgggactacaggggtgtgccaccacacctggctaactttttatttttattagagacaggttttcactatattggccaggctggtcttgaactcctgacctcaggtgttccgcctgcctcagcctcccaaagtgctgggattccaggcgtgagccaccacacctagcctttttttgtatttttagtagagatggggtttcaccatgttggccaggctgatcttgaacacctgacctcaggtgatccagccgccttggcatcccaaagtgctgggattacaggggtgagccactgcgcctggcttagtttctttttcttttctctgatttttttttttttttgaaacagagtctcactgttgcccaggctggagtgcagtggcgtaatctcagctcactgtaacctccgcctcccagcaaagctcagtttcttcatctgtaaaaccgttcattcattagcagagatactcactgagcatctactatgtgctagctaatttttatatttttagcaccgatgggatttcaccacgttgaccaggctggtcttgaactcctgacctcaagtgacctgccctcctcatgtattccaggtcctgggaatacagctgtgaaccagaaagataagatccctttcctcatggagcttgtattctagaaaatcctgtagacggaatttacttttgggcaaaaataaagcagaactggaatatgagacggggttgtcaggacaggccacactgagaaagtgttattgggcagagacgaggaaaggtgacgagggagcaagccctgtgggtatctgaggaacagcaaactcgaaggccccgaggcatgattgagacgcggtggggagtcccatggggctggagtgacatgtctcatagagaaggggtagaaagtgaggcaagatggagggcacctgtagtgccagctacaggaggcaggaggatcattttggccctggaggttgaggctgtagtgaggcatgattgcgccactgcactccagcctaggcaacagagtgagactctgtctcaaaaaaataaaaaagaagtcgggcgtggtggctcacacctgtaatcccggcactttgggaggccgaggcgggtggatcacctgaggtcgggagtttgagaccagcttgaccaacatggtgaaaccccgtctttcctaaaaataaaaaaaatcagcagggcgtggtgacacacatctgtagtcctagctactcgagaggctaagcaggagaatcgctcgaacccgggaggcagagattgcagtgagccaagatcgcgccaatgcactccagcatgggtgacagtgagactcggtctcaaaaaaaaaaaaaaaaaaaagaaagaaagaggctgggcgcggtggctcacacctgtaatcccagcactttgggaggctgaggagggcagatcacttgaggtcaggagttcgagatcagcctggtcaacgtggtgaaatcccatcggtactaaaaatataaaaattagccagatgtggtggcgcacgcttgtaattgcagctactcaggaggctgaggcaggagaatttcttgaacctagaaagtggccgagattgcgccatcctgggcgacagagcaagactctgtctcaaaaaaaaaaaaaaaaaaaaaaaaaaaaaaaaaaaaaaaaagaaaagaaaaaagaaaaagagacaaagaaagaaaaataaatgaggccagagctatgggaggattttaagtggaggagtgaccgtggggctgttgtgtgacactgctagctttacttgtgtgcctaagtggtcctttctcagaatcttactttcttttcgtataaaatggggcttagcattgccatctgcaggacaagtacaagtcctaataatagctgacatttctggaaggcttgccatgtgtactttttggcatgacatcattgggtcctcatcgcaaacctctgaggttgattctattttcatcctcctctgaaaaatgagtcactgcagtcagagagggaaggccacctgtccctgaccacacagctgatgtcaggcacgtgggtcctaagccttccagggcctgccccctgggtccccatcctccagcctggaggccccagggcacggcttccctgctcacacctcagtttccttgctatcctagaaacctaagggtagctgggcgcggcagctcatgcctgtaattccagcactttgggaggccgaggtggccaattaccagccagaggtcaggagttcgagaccagcctggccaacgtggtgaaaccccgtctctactaaagttacaaaaattagccgggcatggtggcaggtgcctgtaatcccggctactcaggaggctgaggcaggagaattgcttgaacctgagaggcagaggttgcagtgagccaagatcgcaccactgcgctccagcctggacgacagagtaactctgtcaataataataataataataataaataaactgctgggcacagtggctcaagcctctaatcccagtactttgggaggccgaggtgggcagattacctgaggttgggagtttgagaccagcctgaccaacatggagaaaccccgtctctactaaaaatagaaaattagccgggcgcggtggctcatgcctgtaatcccagctactcgggaggctgaggcaggagaattgcttgaacctgggaggcagaggttgcagtgagccgagatcacgccattgcattccagcctgggcaacaagagccaaactccgtctcaaaataaacaaacaaactaactaaagaagcctaacagtaaatggcagctggtgtgtatgtgaccctgttgctctgcttcctccagggacacggccaacacggtgaaggaaaagttcgggaggaagctttatgaatccttactggtgtgagtgccccaccctcagccctgtgccctcctaggccctgactaacccctctcattactccgttctcacatgcatgcccctgcttgccttgcagtgggagccttcccgacatgaacaagatgctggataaggaagacttcactatgatgaagagagccatctttgcaacgcaggtatggattggacctctgtgcagagagatagcagttcctggcagccccagaggcagcttgccaggccagctcagaccccagagattgctgggagtcctgctttctcctgcagccctttatgaagggatctattctgaggtccacagaagggcacgtgctgactcgtgcaacttcagttgctggaggcgaggcacttagggtgggctgttttctgtggcttattctgccacgagggttgctgggacgtgtggtttctctgggattctggggtcaatgagcaaaaggaagcttatttgtttatttatttttattatatttatttatttattttgagatggagtctcgctctgtcgcccaggctggagtgcagtggcacgatctcggctcactgcaacctctgcctcctgggttcaagcaatactcctgccttggcctcccaagtacctgggattacaggcacatgccaccacacccagctaatttatatatttttagtagaaacgagatttcaccatgttggccaggccagtctcaagctcctgacctcaagtgttctgtctgcctcagcctcccaaagtgctgagtttacaagcgtgagtccctgttcccagcccaaagggaagtttaaaaggaagtgtagaaatgtaataaagggccaggtgtggtggctcatgcctgtaatctcagcactttgagaggccaaagcaggaagatcacttgagaccaggaggctgaggctgcagtgagccatgactgtgccactgtacaccagcctgggggacagagccagatcccacactagccccccacccacccccaaaagaaagtcaaggcccagcttggtagctcacacctgtcagtattcccagcactttgggaggctgaggtgggaggatcgcttgagcccaggagtttgagaccagcctgggcaacatgatgaaaccctgtctctaccaaaaatacaaaaatgagctgggcatagtggcatacacctgttatcccagctacctgggaggctgaggccagaggatgccttgagctcaggaggtcaaggctgcagtgagctatgattatgccgctgcagtgagctatgattatgccactgcactccagactgggcaacagagcgaggcggacacatacacacacacacgaaagaaggaaaagaaagaaaagaaaaggtcaagacagccataaaagaattacaactctcagctctccttgggccttgctgcacacggctccacctctacccctaaaactgctgggagtggtagttttatcgggccactttagggacgcagtcaggaggtgagcaaaagcacccagcattctccagaaaacattgcaaactctcagcagctgcggtttcttatttccagaggctgtgtgttggtccccagacacccctgggaattgtagctgctttagatccctaacttcagagagaattggcatttataaaatgagaacttaccgtcattctattgagtctaggggcccaaaaaactacaactcccagcagcccctgctggctttctggggcattgacgcttcccttgtccagaggcttctgggagttagagttctttcattctctggggtccagggacttcagtacttgtggtctacattggggagccatttcctggggaatggaaacccagacagctaagttgtagaaacaaaacgtgaactgcttttggctaacctataatttccaatagtccctaaagcagcccacctcattatgaatgtttctgccatcgggatgctgggagttgtagtttctcgggcccctagactcagtagagtggtggtaagtaaaatctttaatgagctatgatggaacagttgctaagaactatacaccccagcagtcctcaggacttcctatcacactagctctgtcttgctccagagactcttggaaattgtggtttctttgggcctttgttagggttggaggtgaattttcttttttcttcttttttttttttttttttttttttgagacggagtctcgctctgtcgcccaggctggagtgcagtggcgcgatcttggctcacttcaacctccgcctcccggattcatgccgttctcctgccccagcctcctgaggcacccaccaccacgcctggctaattttttgtatttttagtagagacggggtttcaccgtgttagccaggatggtctcgatctcctgacctcgtcatcctcctgcctcggcctcccagagtgctgggattacaggcgtgagccaccacgcctggtggttggaagtgaattttcataaggaaactacaactcccagcagtctccaaagcttgctgccatattggcacagtctccacccccattgactggggatagttatatttcctttgggtttctttaataatagagcccagagtacagaacaaggtagctgcaactcctcatagtccttggaggtaagggagttgctaacacggctttgcctcaaagacagctgggaattctagttctttgaagctcatggtggttaagggaaggaaaacatttccaggccaggtgtggtggctcatgtctgtaatcccagcacttcgggaggccaaaacggatgcatcgcttgagcccatgagttcgagaccaacttggccaacatagtgaaaccccatctctattaaaaaaaaaaaaaaaaaaaattaggctgagcgcaatggctcacgcctgtaatcccagcactttgggaggccaaggcaggtggatcacgaggtcaggagatctagaccatcctgatttaacacagtgaaacctcgtctctactaaaaatacaaaaaattaaccgggcgtggtggtaggcgcctgtagttccagctactcgggaggctgaggcaggagaatggcatgatcctgggaggtggagcttgcagtgagccgagattgtgccactgcattccagcctgggcgacagagcgagactccgcctcaaaaataaataataataatttaaaagaaaagaaagaaaacctttacaggttgtactagtgggaatccacaactcctggtgatcacttgggtttgttgccccacgtccggtgcatttgtggtctccttggctcccccagggtccgcatggctcatgaggaagtagggagttctctgtcccttccatgaccccttacccttcttgtggctcctgcagcggcagtctttcccccctgtgtgcacccacaatatgctggatgactcctcagaccccatcctgaccaccatccgccgaatcggcctcttcaatagcagtgccgacagggtgaaggtgagggcatttggtcagggctgggttgggcacggcagagggaaggggttgggtcctgggcctcacacactccattcccctataagttttatcaaaggtattgctgtggttagaaagaaccctggcttctgaggcaggcagacctgggtttgaacattggtcctgccaaacacatgctgtgtgatgctagacaagctttttaccctctctgggccaccttgggatctcagggcttagctaaataaggcacttgggctgagtccttctttttcactaccaggtgattttccacccggagttcctctcctccacaagccccctgctccctgtggactatgaggagtttgtccgtggctgtcaccttggagtcttcccctcctactatgagccttggggctacacaccgggtgagtgtagtgggcaggggacagcgtggtcatggcatcctagtcagagctagcatgtcttggggcgaggcactggccttctctgagcctgttgccttctttgcaaaacaggaacaatggtaatcacctgttctgctacagcgcgtgcttttgtgatacaatagctcatgtattgagaaactagaagactgggttttgaggactagtgaactggatgtcacagttcacactgctttctcccagaaagcagtggccccccaaatagtggcaatgaaatgcacaattcacaaatacagccgagtgtggccaagtctcctcgtaagacgttcccagtgcccatcaactccaccttcctcttgttggttcacattagccagtgtttttaaagctaaataaggctgggcgtggtggctcatgcctgtaatcccagcacttggggaggccaagatgggcagatcatgaggtcaggagtttgagaccagcctggccaatatagtgaaaccctgtctctactaaaaatacaaaaattagccaggtgtggtggtacgcacctgtagtctcagctacttgggaggctgaggcagagaattgcttgaacttgggaggcggaggttgcagtgagctgagatcatgccactgcactccggcagtgctgtgctctgggtgacagagcgagactccgtctcaaaaaaaaaaaaaaaaaaaaattaaagctaaattagtgccatttcctaatttattagtaatttaacaagtcctgcaaactgtgcttgcatgataattaggagtcgcggtcagccccaattccctttttccataggccttgttttatagatagattgatagatagtactagtctgttttcacaccgctataaaaaaaaaatccaagactgggtaatttataacggaaagaggtgtaattgactcaccgttccacatgtctggagaggcctcagaaaactcagtcatggcagaaggggaagaaagaagcttcttctcatggcggcaggagggagaagtatgtgagggtgcaggaaaaacgaacatttataaaaccatgagatctcgtgagaattcactcactatcatgagaacagcggcgggggaaccacccccgtaatccaatcatttccctccctcgacacgtggggactacattttgagatgaaatttgggggggaacacagagtcaaactatatcataaatatatatttaatacattttactatttgtttcttttttgagatggggttattactctgttgccaaggctcacctggaactcctaggttcaggtgcttctgcctcagcctcttgagtatctgtcattataggtgcatcccaccatgcctgacagatgtattatatttagtgcctatttttgcagtttacagatgtttttaggaaaacttacataagaattatagatcaggccaggcatggtggctcacgcctataatccccacactttgggaggccgaggtgggaggatcacttgaggacatgagtttgagaccagcctggccaacatggtgaaaccctatctctactacaaatacaaaaattagctgggggtggtggcaggcacctgtaatcccagcccttcgggaagttgaggtgggagaatcgtttgaaccccagaggcagagattgcagtgagctgagatcgcgccactgcactccagcctgggcgacagagtcagaccctgtctaaaataataataataataattataggtcaggggcagtggctcacacctataatcctagcatcttggaaggctgaggtgggaggatagcttgagctcaggagttcaagaccagcctggacaacatggtgagaccctgtctctataaaagatttttttttttttttgagacagagtcttgctctattgccaggctggagtgcagtggcacagtcttggctcactgcaaccgcctcccgggttcaagtgattctcctgcctcagcctccagagtagctgggactataggcgcctgccaccacacccagctaatttttgtatttttattagacacagggtttcaccatgttggccaggatggtttttttttttttctcttcttgacctcgtgatccacccgccttggcctcccaaagtgctgggattacagacatgagccaccgtgcccggccttttttttttttatttttaattagccatgcgtagtgttgtgtgctcgtagtcccagcctcttgggtggctgaggtgggaggattgcttgagcctaggaggtcaaggctgcagtgagctatgatcaagccactgtcctccaggttgggtgataaagtgagaccttgtctcgagaaaaaaaaaaaaaaagcattgggccaggcgcagtggctcacacctataatttgaccactttgggaagccaagacggatggatcacctgaggtcaggagttcaagacctgcctggccaacatggtgaaaccctgtctatactaaaaaatacaataattaactgggcatggtggtgtgtgcctgtagtcccagctactcgggtggctaaggcacgaaaatcgcttgaacccgggaggtgaaggttgcagtgagccgagattgtgccactgcactacagcttgggtgacagagtgagaccctgtctcgaaagaaaaaaaaaaaagcataaaaatccatcaaaaaattataatacattccttgaactatttctcaaggttgttaaaggtattaaacaagacgtactagatgctctgtacacagggatactaataatgagagaccttatcttaccccccatcaaaatagactaagtccgtacaagatactggcacaagaaaggatcttacaggttgtgacaattaagtagaatgatggaccttggcccgatcctacaggttgtgagagttaagtcaaatggatattgggatgctcaataaattagcatccttatctcccaactatggactttcccgcatcttggagcaagagcaagtaattctcttttctgagcctcttagcgtcccctctgagaaatagggaaatgcacagcctggttgtgggggctcagcgacgctccgcacagcgcctggcacttggtacaggcgccagtagagggcggtgttgaggcgtctattgcgattaagacggtaggcgatgagggaagctaagtgggtctctctcctgccttcccgcagctgagtgcacggttatgggaatccccagtatctccaccaatctctccggcttcggctgcttcatggaggaacacatcgcagacccctcagcttacggtcagcgcccaggcccctgaggattctggaagggggcttgagaacagtgactcctggatcctgggaaggaggagcttgcacccttggagaccaggggcaccaggaaatgggggggctctcgggccgctgggagaggaggggtcctggtgccacagagtcctggagaccatgaagatctccccaggatgttttctgaacctgggtcctggcctccacaggtatctacattcttgaccggcggttccgcagcctggatgattcctgctcgcagctcacctccttcctctacagtttctgtcagcagagccggcggcagcgtatcatccagcggaaccgcacggagcgcctctccgaccttctggactggaaatacctaggccgggtaggacccccactttcctatcctctcctggcaaatcagcagctcctggctaggggtctttggtgcagggtgcagggtctcatcctacttgtaacagttgctgtccctttaagcaatgaaccaggccgatcgcgatggtggctcatggttgtaatcccagcactttgggaggcctaacaggaaggatcgcatgagctcaggagttaagagaccagcctgggcaacattttatttttactaaaaataaaaaaaaatcagccgagcgtgatggtgcgtgcctgtagtcccagctactggggaggctgaggtggtagggtcgcttgagccccggaggttgaggctgcagtgagccttgttcaaacccactgcactccatcctagagtaacagaacaagaccgtgtttaaaaagaaaaaaagaacattggtcaggcgttctcatttgcataagggtgtggccaaagaggagactcacttgagaattcggcccctgtttgaggggtatggctcagaaactgtccattcacaggtctgcttatctacataaggggtggagtcagatagatggattatttgtatggggtgcagcagtgtgctcatctgcataaagggtgtggccaagacccccatcatctgcctgggggtggggcctggctctcacatcctctgccccctctcctcctttcccctagtactatatgtctgcgcgccacatggcgctgtccaaggcctttccagagcacttcacctacgagcccaacgaggcggatgcggtgagtggaccctggatttctgcttagccaggagctaaagggctgggcttcggtggggtgggggtccctcctggagtgggaaggcctagaggtggctggatgcctgggtgggactgtgaggtcctcagctcaccctggtttgcacccacatcgccgtatgcaggcccaggggtaccgctacccacggccagcctcggtgccaccgtcgccctcgctgtcacgacactccagcccgcaccagagtgaggacgaggaggatccccggaacgggccgctggaggaagacggcgagcgctacgatgaggacgaggaggccgccaaggaccggcgcaacatccgtgcaccagagtggccgcgccgagcgtcctgcacctcctccaccagcggcagcaagcgcaactctgtggacacggccacctccagctcactcagcaccccgagcgagcccctcagccccaccagctccctgggcgaggagcgtaactaagtccgccccaccacactccccgcctgtcctgcctctctgctccagagagaggatgcagaggggtgctgctcctaaacccccgctccagatctgcactgggtgtggccccgcagtgcccccacccagtccgccaaacactccaccccctccagctccagtttccaagttcctgcactccagaatccacaaagccgtgcctttctctggctccagaatatgcataatcagcgccctggagtcccctgggcctggaccgcttcccagaggccaggaatctgccattactctgcggtggtgccagaggttttaggaaacctggcatggtgctttcaggtctggggcttttagagccccccgtgtggcttacaaattctacagcatacagagcaggccacgctcaggcccggcatgcgggccaccaagttctggaaaccacgtggtgtccctgcgaatggggcgatcaagtccagagccggggcactttcagagtttgaaggtaactgagagcagatggtcctccatttcaactccagaagtggggctctgggagggatgttctagccctccctggcatgtcagagccaggctctgcctggaggatccctccatccggctcctgtcatcccctacactttggccaagcaagaggtggtagaaccacttggctgctcattccttctggaggacacacagtctcagtccagatgccttcctgtctttctggccctttctggaccagatcctactcttcctttctaaatctgagatctccctccagggaatccgcctgcagaggacagagctggctgtcttcccccacccctaacctggcttattcccaactgctctgcccactgtgaaaccactaggttctaggtcctggcttctagatctggaaccttaccacgttactgcatactgatccctttcccatgatccagaactgaggtcactgggttctagaacccccacatttacctcgaggctcttccatccccaaactgtgccctgccttcagctttggtgaaagggagggcccctcatgtgtgctgtgctgtgtctgcaccgcttggtttgcagttgagaggggagggcaggaggggtgtgattggagtgtgtccggagatgagatgaaaaaaatacatctatatttaagaatcccaggtgtggtcagacatgacacttggtgggcctggctgtgacgtccccccagtaccaccccttccctggtctgagctcatcctcttattctagagagacttggggggtctccctatgttgcttaggctggtctcaacctcctgggctcaagtgatcgtcctgccttggcctcccaaagtgctgggattacaggcttgaaccaccctgccccagacccaggggaaggagaaggggaagagtcagagctgacacagcagttttgcagcttggacacagcaagtgctttttaaggcctgttttaagcttcttcagttcccatttggagaatccggcccaaggtttcacatcccatttctgtgatgaaccctaaaccccttgtccagcattgcttgggcatcacgtgttcctggctgctcagctccactggccagttcctctcagtgtgcgcctcacattgggatcactcaagctcgggccataatctcttaaactctggagcaaagacctcagtgagccccccggttgccatgcaagttgcatagcaatagcgtcaatgtgcccatataaagggcctaataattccaactgcctcccagaattgaggcttttttcttttttgagacagagtcttactctgttgcccaagctggagcacagtggcgccatctcagctcaccgcaacttccgtgaggcagacatgttttttgtttgagatgggagttccactctttttgcccaggctggagtgcaatgacgccatctcagctcactgcaacctccgcctcccagattcaagcgattctcctacctcaacctcctgactagctgggattacaggtatgagccaccacacccagctaattttgtattttagtagagacggggtttcttcatgttggtcaggctggtctcgaactcctgacatcaggtgagcgacccacctggccccataatcactcgttaaatagggctgtttctggctgagacctaacatctgtttctagataccaacctaggtcttaattcaactccctggagtctatctctaccatctgggagggacagttaacagccaggcaagcagagaaccctcaggttcaacactacccagatagcctcttgtcttaggacagttaagaaaatgggagatggggccaactcctctttcactggcatcccaacccagccagaagctttatgagaacagatcccacctcatcttccacaccacacacaaaaccaccagctgcatcaaaaagctttatttccatttggtccaaggcttgttaggatagttaagaaagctgcctattggctggagggagaggcttaggcagaagccctattactttgcaaggggcccttcagaagtcgctgggctcagaaggctcttagtcgtgcttgagagtgagcctttcgaagagatactcgcccagcccagcctccgggccacccagcctgtggaggttggtcaggtggtcacccatcttcttgataagcttcacttcctcatctaggaagtgagtctccaggaagtcacagagctgagagagaagagggagaaattagaaacccaatccctggaaaagagggggagagagcagccagttgcagattaaaatgtgacaggtgtgaaatgaggctctgaaggaaatttgcccaaagggagcagaggcttgaggggtatggttgggtagccatggatgcagcgggtacgtacatgggggtccgtgcgggcagaacccagggcatgaagatccaaaagggcctggttcagctttttctccagggccatggcagctttcatggcgtctggggttttaccccactcatcttcagctggcttctatatagaagggagaaatggctcagaatacacacactcggcacatagaactaaacctacatttcccaagagtcgttgggggtcagaggcccaggccacaaagacatgtgacagcttgtatttatcactctccgcaccctgtcctagctcttacag

SEQ ID NO: 5 - RNA, 3635 nt, Homo sapiens; identical to SEQ ID NO: 1
  source 1..3635: mol_type = mRNA

SEQ ID NO: 6 - RNA, 3443 nt, Homo sapiens
  source 1..3443: mol_type = mRNA
tcctggcggctgcgaggtttcactgcaggggcgccagtgggctcagtgacgctgcggcctccttctgcctaggtcccaacgcttcggggcaggggtgcggtcttgcaataggaagccgagcgtcttgcaagcttcccgtcgggcaccagctactcggccccgcaccctacctggtgcattccctagacacctccggggtccctacctggagatccccggagccccccttcctgcgccagccatgcctttaaaccgcactttgtccatgtcctcactgccaggactggaggactgggaggatgaattcgacctggagaacgcagtgctcttcgaagtggcctgggaggtggctaacaaggtgggtggcatctacacggtgctgcagacgaaggcgaaggtgacaggggacgaatggggcgacaactacttcctggtggggccgtacacggagcagggcgtgaggacccaggtggaactgctggaggcccccaccccggccctgaagaggacactggattccatgaacagcaagggctgcaagttcctggcacagagtgaggagaagccacatgtggttgctcacttccatgagtggttggcaggcgttggactctgcctgtgtcgtgcccggcgactgcctgtagcaaccatcttcaccacccatgccacgctgctggggcgctacctgtgtgccggtgccgtggacttctacaacaacctggagaacttcaacgtggacaaggaagcaggggagaggcagatctaccaccgatactgcatggaaagggcggcagcccactgcgctcacgtcttcactactgtgtcccagatcaccgccatcgaggcacagcacttgctcaagaggaaaccagatattgtgacccccaatgggctgaatgtgaagaagttttctgccatgcatgagttccagaacctccatgctcagagcaaggctcgaatccaggagtttgtgcggggccatttttatgggcatctggacttcaacttggacaagaccttatacttctttatcgccggccgctatgagttctccaacaagggtgctgacgtcttcctggaggcattggctcggctcaactatctgctcagagtgaacggcagcgagcagacagtggttgccttcttcatcatgccagcgcggaccaacaatttcaacgtggaaaccctcaaaggccaagctgtgcgcaaacagctttgggacacggccaacacggtgaaggaaaagttcgggaggaagctttatgaatccttactggttgggagccttcccgacatgaacaagatgctggataaggaagacttcactatgatgaagagagccatctttgcaacgcagcggcagtctttcccccctgtgtgcacccacaatatgctggatgactcctcagaccccatcctgaccaccatccgccgaatcggcctcttcaatagcagtgccgacagggtgaaggtgattttccacccggagttcctctcctccacaagccccctgctccctgtggactatgaggagtttgtccgtggctgtcaccttggagtcttcccctcctactatgagccttggggctacacaccggctgagtgcacggttatgggaatccccagtatctccaccaatctctccggcttcggctgcttcatggaggaacacatcgcagacccctcagcttacggtatctacattcttgaccggcggttccgcagcctggatgattcctgctcgcagctcacctccttcctctacagtttctgtcagcagagccggcggcagcgtatcatccagcggaaccgcacggagcgcctctccgaccttctggactggaaatacctaggccggtactatatgtctgcgcgccacatggcgctgtccaaggcctttccagagcacttcacctacgagcccaacgaggcggatgcggcccaggggtaccgctacccacggccagcctcggtgccaccgtcgccctcgctgtcacgacactccagcccgcaccagagtgaggacgaggaggatccccggaacgggccgctggaggaagacggcgagcgctacgatgaggacgaggaggccgccaaggaccggcgcaacatccgtgcaccagagtggccgcgccgagcgtcctgcacctcctccaccagcggcagcaagcgcaactctgtggacacggccacctccagctcactcagcaccccgagcgagcccctcagccccaccagctccctgggcgaggagcgtaactaagtccgccccaccacactccccgcctgtcctgcctctctgctccagagagaggatgcagaggggtgctgctcctaaacccccgctccagatctgcactgggtgtggccccgcagtgcccccacccagtccgccaaacactccaccccctccagctccagtttccaagttcctgcactccagaatccacaaagccgtgcctttctctggctccagaatatgcataatcagcgccctggagtcccctgggcctggaccgcttcccagaggccaggaatctgccattactctgcggtggtgccagaggttttaggaaacctggcatggtgctttcaggtctggggcttttagagccccccgtgtggcttacaaattctacagcatacagagcaggccacgctcaggcccggcatgcgggccaccaagttctggaaaccacgtggtgtccctgcgaatggggcgatcaagtccagagccggggcactttcagagtttgaaggtaactgagagcagatggtcctccatttcaactccagaagtggggctctgggagggatgttctagccctccctggcatgtcagagccaggctctgcctggaggatccctccatccggctcctgtcatcccctacactttggccaagcaagaggtggtagaaccacttggctgctcattccttctggaggacacacagtctcagtccagatgccttcctgtctttctggccctttctggaccagatcctactcttcctttctaaatctgagatctccctccagggaatccgcctgcagaggacagagctggctgtcttcccccacccctaacctggcttattcccaactgctctgcccactgtgaaaccactaggttctaggtcctggcttctagatctggaaccttaccacgttactgcatactgatccctttcccatgatccagaactgaggtcactgggttctagaacccccacatttacctcgaggctcttccatccccaaactgtgccctgccttcagctttggtgaaagggagggcccctcatgtgtgctgtgctgtgtctgcaccgcttggtttgcagttgagaggggagggcaggaggggtgtgattggagtgtgtccggagatgagatgaaaaaaatacatctatatttaagaatcccaaaaaaaaaaaaaaaaaa

SEQ ID NO: 7 - RNA, 3436 nt, Homo sapiens
  source 1..3436: mol_type = mRNA
tcctggcggctgcgaggtttcactgcaggggcgccagtgggctcagtgacgctgcggcctccttctgcctaggtcccaacgcttcggggcaggggtgcggtcttgcaataggaagccgagcgtcttgcaagcttcccgtcgggcaccagctactcggccccgcaccctacctggtgcattccctagacacctccggggtccctacctggagatccccggagccccccttcctgcgccagccatgcctttaaaccgcactttgtccatgtcctcactgccaggactggaggactgggaggatgaattcgacctggagaacgcagtgctcttcgaagtggcctgggaggtggctaacaagggtgtatttcgggcgctggctgatcgagggaggccctctggtggtgctcctggacgtgggtgcctcagcttgggccctggagcgctggaagggagagctctgggatacctgcaacatcggagtgccgtggtacgaccgcgaggccaacgacgctgtcctctttggctttctgaccacctggttcctgggtgagttcctggcacagagtgaggagaagccacatgtggttgctcacttccatgagtggttggcaggcgttggactctgcctgtgtcgtgcccggcgactgcctgtagcaaccatcttcaccacccatgccacgctgctggggcgctacctgtgtgccggtgccgtggacttctacaacaacctggagaacttcaacgtggacaaggaagcaggggagaggcagatctaccaccgatactgcatggaaagggcggcagcccactgcgctcacgtcttcactactgtgtcccagatcaccgccatcgaggcacagcacttgctcaagaggaaaccagatattgtgacccccaatgggctgaatgtgaagaagttttctgccatgcatgagttccagaacctccatgctcagagcaaggctcgaatccaggagtttgtgcggggccatttttatgggcatctggacttcaacttggacaagaccttatacttctttatcgccggccgctatgagttctccaacaagggtgctgacgtcttcctggaggcattggctcggctcaactatctgctcagagtgaacggcagcgagcagacagtggttgccttcttcatcatgccagcgcggaccaacaatttcaacgtggaaaccctcaaaggccaagctgtgcgcaaacagctttgggacacggccaacacggtgaaggaaaagttcgggaggaagctttatgaatccttactggttgggagccttcccgacatgaacaagatgctggataaggaagacttcactatgatgaagagagccatctttgcaacgcagcggcagtctttcccccctgtgtgcacccacaatatgctggatgactcctcagaccccatcctgaccaccatccgccgaatcggcctcttcaatagcagtgccgacagggtgaaggtgattttccacccggagttcctctcctccacaagccccctgctccctgtggactatgaggagtttgtccgtggctgtcaccttggagtcttcccctcctactatgagccttggggctacacaccggctgagtgcacggttatgggaatccccagtatctccaccaatctctccggcttcggctgcttcatggaggaacacatcgcagacccctcagcttacggtatctacattcttgaccggcggttccgcagcctggatgattcctgctcgcagctcacctccttcctctacagtttctgtcagcagagccggcggcagcgtatcatccagcggaaccgcacggagcgcctctccgaccttctggactggaaatacctaggccggtactatatgtctgcgcgccacatggcgctgtccaaggcctttccagagcacttcacctacgagcccaacgaggcggatgcggcccaggggtaccgctacccacggccagcctcggtgccaccgtcgccctcgctgtcacgacactccagcccgcaccagagtgaggacgaggaggatccccggaacgggccgctggaggaagacggcgagcgctacgatgaggacgaggaggccgccaaggaccggcgcaacatccgtgcaccagagtggccgcgccgagcgtcctgcacctcctccaccagcggcagcaagcgcaactctgtggacacggccacctccagctcactcagcaccccgagcgagcccctcagccccaccagctccctgggcgaggagcgtaactaagtccgccccaccacactccccgcctgtcctgcctctctgctccagagagaggatgcagaggggtgctgctcctaaacccccgctccagatctgcactgggtgtggccccgcagtgcccccacccagtccgccaaacactccaccccctccagctccagtttccaagttcctgcactccagaatccacaaagccgtgcctttctctggctccagaatatgcataatcagcgccctggagtcccctgggcctggaccgcttcccagaggccaggaatctgccattactctgcggtggtgccagaggttttaggaaacctggcatggtgctttcaggtctggggcttttagagccccccgtgtggcttacaaattctacagcatacagagcaggccacgctcaggcccggcatgcgggccaccaagttctggaaaccacgtggtgtccctgcgaatggggcgatcaagtccagagccggggcactttcagagtttgaaggtaactgagagcagatggtcctccatttcaactccagaagtggggctctgggagggatgttctagccctccctggcatgtcagagccaggctctgcctggaggatccctccatccggctcctgtcatcccctacactttggccaagcaagaggtggtagaaccacttggctgctcattccttctggaggacacacagtctcagtccagatgccttcctgtctttctggccctttctggaccagatcctactcttcctttctaaatctgagatctccctccagggaatccgcctgcagaggacagagctggctgtcttcccccacccctaacctggcttattcccaactgctctgcccactgtgaaaccactaggttctaggtcctggcttctagatctggaaccttaccacgttactgcatactgatccctttcccatgatccagaactgaggtcactgggttctagaacccccacatttacctcgaggctcttccatccccaaactgtgccctgccttcagctttggtgaaagggagggcccctcatgtgtgctgtgctgtgtctgcaccgcttggtttgcagttgagaggggagggcaggaggggtgtgattggagtgtgtccggagatgagatgaaaaaaatacatctatatttaagaatccca

SEQ ID NO: 8 - RNA, 3443 nt, Homo sapiens; identical to SEQ ID NO: 6
  source 1..3443: mol_type = mRNA

SEQ ID NO: 9 - RNA, 3453 nt, Homo sapiens
  source 1..3453: mol_type = mRNA
tcctggcggctgcgaggtttcactgcaggggcgccagtgggctcagtgacgctgcggcctccttctgcctaggtcccaacgcttcggggcaggggtgcggtcttgcaataggaagccgagcgtcttgcaagcttcccgtcgggcaccagctactcggccccgcaccctacctggtgcattccctagacacctccggggtccctacctggagatccccggagccccccttcctgcgccagccatgcctttaaaccgcactttgtccatgtcctcactgccaggactggaggactgggaggatgaattcgacctggagaacgcagtgctcttcgaagtggcctgggaggtggctaacaagggtgtatttcgggcgctggctgatcgagggaggccctctggtggtgctcctggacgtgggtgcctcagcttgggccctggagcgctggaagggagagctctgggatacctgcaacatcggagtgccgtggtacgaccgcgaggccaacgacgctgtcctctttggctttctgaccacctggttcctgggtgagttcctggcacagagtgaggagaagccacatgtggttgctcacttccatgagtggttggcaggcgttggactctgcctgtgtcgtgcccggcgactgcctgtagcaaccatcttcaccacccatgccacgctgctggggcgctacctgtgtgccggtgccgtggacttctacaacaacctggagaacttcaacgtggacaaggaagcaggggagaggcagatctaccaccgatactgcatggaaagggcggcagcccactgcgctcacgtcttcactactgtgtcccagatcaccgccatcgaggcacagcacttgctcaagaggaaaccagatattgtgacccccaatgggctgaatgtgaagaagttttctgccatgcatgagttccagaacctccatgctcagagcaaggctcgaatccaggagtttgtgcggggccatttttatgggcatctggacttcaacttggacaagaccttatacttctttatcgccggccgctatgagttctccaacaagggtgctgacgtcttcctggaggcattggctcggctcaactatctgctcagagtgaacggcagcgagcagacagtggttgccttcttcatcatgccagcgcggaccaacaatttcaacgtggaaaccctcaaaggccaagctgtgcgcaaacagctttgggacacggccaacacggtgaaggaaaagttcgggaggaagctttatgaatccttactggttgggagccttcccgacatgaacaagatgctggataaggaagacttcactatgatgaagagagccatctttgcaacgcagcggcagtctttcccccctgtgtgcacccacaatatgctggatgactcctcagaccccatcctgaccaccatccgccgaatcggcctcttcaatagcagtgccgacagggtgaaggtgattttccacccggagttcctctcctccacaagccccctgctccctgtggactatgaggagtttgtccgtggctgtcaccttggagtcttcccctcctactatgagccttggggctacacaccggctgagtgcacggttatgggaatccccagtatctccaccaatctctccggcttcggctgcttcatggaggaacacatcgcagacccctcagcttacggtatctacattcttgaccggcggttccgcagcctggatgattcctgctcgcagctcacctccttcctctacagtttctgtcagcagagccggcggcagcgtatcatccagcggaaccgcacggagcgcctctccgaccttctggactggaaatacctaggccggtactatatgtctgcgcgccacatggcgctgtccaaggcctttccagagcacttcacctacgagcccaacgaggcggatgcggcccaggggtaccgctacccacggccagcctcggtgccaccgtcgccctcgctgtcacgacactccagcccgcaccagagtgaggacgaggaggatccccggaacgggccgctggaggaagacggcgagcgctacgatgaggacgaggaggccgccaaggaccggcgcaacatccgtgcaccagagtggccgcgccgagcgtcctgcacctcctccaccagcggcagcaagcgcaactctgtggacacggccacctccagctcactcagcaccccgagcgagcccctcagccccaccagctccctgggcgaggagcgtaactaagtccgccccaccacactccccgcctgtcctgcctctctgctccagagagaggatgcagaggggtgctgctcctaaacccccgctccagatctgcactgggtgtggccccgcagtgcccccacccagtccgccaaacactccaccccctccagctccagtttccaagttcctgcactccagaatccacaaagccgtgcctttctctggctccagaatatgcataatcagcgccctggagtcccctgggcctggaccgcttcccagaggccaggaatctgccattactctgcggtggtgccagaggttttaggaaacctggcatggtgctttcaggtctggggcttttagagccccccgtgtggcttacaaattctacagcatacagagcaggccacgctcaggcccggcatgcgggccaccaagttctggaaaccacgtggtgtccctgcgaatggggcgatcaagtccagagccggggcactttcagagtttgaaggtaactgagagcagatggtcctccatttcaactccagaagtggggctctgggagggatgttctagccctccctggcatgtcagagccaggctctgcctggaggatccctccatccggctcctgtcatcccctacactttggccaagcaagaggtggtagaaccacttggctgctcattccttctggaggacacacagtctcagtccagatgccttcctgtctttctggccctttctggaccagatcctactcttcctttctaaatctgagatctccctccagggaatccgcctgcagaggacagagctggctgtcttcccccacccctaacctggcttattcccaactgctctgcccactgtgaaaccactaggttctaggtcctggcttctagatctggaaccttaccacgttactgcatactgatccctttcccatgatccagaactgaggtcactgggttctagaacccccacatttacctcgaggctcttccatccccaaactgtgccctgccttcagctttggtgaaagggagggcccctcatgtgtgctgtgctgtgtctgcaccgcttggtttgcagttgagaggggagggcaggaggggtgtgattggagtgtgtccggagatgagatgaaaaaaatacatctatatttaagaatcccaaaaaaaaaaaaaaaaaa

SEQ ID NO: 10 - RNA, 1276 nt, Homo sapiens
  source 1..1276: mol_type = mRNA
agtgacgctgcggcctccttctgcctaggtcccaacgcttcggggcaggggtgcggtcttgcaataggaagccgagcgtcttgcaagcttcccgtcgggcaccagctactcggccccgcaccctacctggtgcattccctagacacctccggggtccctacctggagatccccggagccccccttcctgcgccagccatgcctttaaaccgcactttgtccatgtcctcactgccaggactggaggactgggaggatgaattcgacctggagaacgcagtgctcttcgaagtggcctgggaggtggctaacaagggtgtatttcgggcgctggctgatcgagggaggccctctggtggtgctcctggacgtgggtgcctcagcttgggccctggagcgctggaagggagagctctgggatacctgcaacatcggagtgccgtggtacgaccgcgaggccaacgacgctgtcctctttggctttctgaccacctggttcctgggtgagttcctggcacagagtgaggagaagccacatgtggttgctcacttccatgagtggttggcaggcgttggactctgcctgtgtcgtgcccggcgactgcctgtagcaaccatcttcaccacccatgccacgctgctggggcgctacctgtgtgccggtgccgtggacttctacaacaacctggagaacttcaacgtggacaaggaagcaggggagaggcagatctaccaccgatactgcatggaaagggcggcagcccactgcgctcacgtcttcactactgtgtcccagatcaccgccatcgaggcacagcacttgctcaagaggaaaccaggcatctggacttcaacttggacaagaccttatacttctttatcgccggccgctatgagttctccaacaagggtgctgacgtctttctggaggcattggctcggctcaactatctgctcagagtgaacggcagcgagcagacagtggttgccttcttcatcatgccagcgcggaccaacaatttcaacgtggaaaccctcaaaggccaagctgtgcgcaaacagctttgggacacggccaacacggtgaaggaaaagttcgggaggaagctttatgaatccttactggttgggagccttcccgacatgaacaagatgctggataaggaagacttcactatgatgaagagagccatctttgcaacgcagcggcagtctttcccccctgtgtgcacccacaatatgctggatgactcctcagaccccatcctgaccaccat

SEQ ID NO: 11 - DNA, 21 bp, synthetic construct
  source 1..21: mol_type = other DNA
cactactgtgtcccagatcac

SEQ ID NO: 12 - DNA, 19 bp, synthetic construct
  source 1..19: mol_type = other DNA
ctgagcatggaggttctgg

SEQ ID NO: 13 - DNA, 27 bp, synthetic construct
  source 1..27: mol_type = other DNA
aagaggaaaccagatattgtgaccccc

SEQ ID NO: 14 - DNA, 25181 bp, Homo sapiens
  source 1..25181: mol_type = genomic DNA
cagtgacgctgcggcctccttctgcctaggtcccaacgcttcggggcaggggtgcggtcttgcaataggaagccgagcgtcttgcaagcttcccgtcgggcaccagctactcggccccgcaccctacctggtgcattccctagacacctccggggtccctacctggagatccccggagccccccttcctgcgccagccatgcctttaaaccgcactttgtccatgtcctcactgccaggactggaggactgggaggatgaattcgacctggagaacgcagtgctcttcgaagtggcctgggaggtggctaacaagggtgagcacgccaggcgtcggggcccttgacgagaaggacagtagtggatgggggcccggaactctgagttgtaggaggacggggctactaggggaacccttgtgacctgggcaaggaggctgtgtccttgaggaggggctgggaagccggaggtgggtgggagagggatggttcgtttgacttaagatgaaaggaggctggaagcccgggttctgggtcctagggaagagggcgctaaaatgagactcctaggtcctggaggcaggcttccgagagactagatacctgggtcctgaacagggaaggggatggggggatgggatttctgcgtgcaaacctgggaagctgccggggtttcagacctatgaccctaacagcatggtctaggggataaaactccagatttgagagagagctgactgggagataggaggcctgagcggcggtgggaggacctgaggatctggctgcttaagaataaagatgggacgggctggagactgtaatgaatgcctgggctttgaaggagctgagggcctgagctattagttcctaggagtagaggagcccatggcctgggacacatgcgtactggaataggggaaggctgggaagtcctaagttagtcagaggctgggccctaggatgggaggggctaggagcctgcatttctgtgtcttgggcttcagaaagctgaggttctggccttggagaaggctggggctgaaatccccaggaacaagccaatctcacacctcaaagagcagggtctggggggttgctttgctgggtcttggaggagaaagggactgtgtctcccaggaggagagggggcccgtgaacacccagccgggtatcgccagggcctgggctccaggatgggaggaggctgggggctggggctcctgggtctgggatagggtcatgggagaggcagagccctgcatgctggtgtccctagtcagggagaggaaattgggaggcaggtcagcaaggtccctgggggcagggaatgaccatgcaggcttctcttgggcaatggtgagaagctggattggccatgagggggtctccctcactgggttttggagcctggctgcgatttaaacccagctcctgtgagctgggaactcgggaacctgagtccgggtagtcagtcctcagctctgccatccttagagccccagtgcctaattccttcagaccaaggggtcccggcacccagccccttctctctcagacccagaagtctagcctgagccccctcctccttcagggtcctgaccccagcccccttctcccttagacccaggaggactgccctccagccctcgtgttcccctcatccaagcttccaacccctactccaaactatgggctcccagtcccctcttccccctgagctagaggtctggggcctgagtgccccctacatccccggcccaccccaccccaggccccagaactatggacctcggccggggcctgccctcacacgcttgggcccacagtgggtggcatctacacggtgctgcagacgaaggcgaaggtgacaggggacgaatggggcgacaactacttcctggtggggccgtacacggagcagggcgtgaggacccaggtggaactgctggaggcccccaccccggccctgaagaggacactggattccatgaacagcaagggctgcaaggtgggacgtggcccagcccagggcagaagcgggtggacagcctgccatcggggtgggagccacagacggagagggtgcagggtggacagccccagccagagagcgaggcaggcttggacacaggaaggaggcgtgataggacacccagacagatgcagggcctggaagtgggtgggtggatcccagacatgggcgaatggacagacagatggcaagtatgagacagactgagacggagatccaagaggccaaggtcctcagacccagagagaaagagagcaagatcgaaagacagcctggtcaacatggcgaaaccccgtctctaccaaaaatacaaaaattagctgggtgtggtggcgggtgcctgtaatcccagctactcgggaggctgaggcaggagaatcgcttgaacccgggaggcggaggttgcagtgagctgcgattgggccactgcactccagcctgggcgacggagcgagactctgtctcagaaaagaatgccagccagccaggcagagctggggagaagtgggcctgaggtcaggaaggagcaggattctggagcttgaagttcaagttcaccctccacttgctgcctgtgtgtccttggctaatggacatgctaatagcgtctaccttctagcggtgctgggaggaggaaacagttaataaggacaaagtggttagtagagttcttggcatgaaggtagcacattgtgtgggcggtgattgtcattgttatgatcatcgtcattattgttactaacagccaagcttggagagtgagggggacaggcagaccaagggagaagggtggatggagccacaggcaagagtaatagactggggacagaagagaggccaccagatgtttcagaaagccagtcctagaaggagagagaagcatggaatatcggggaagagaggagaggtcagtggacagacccacaggacagagtctgagatgggcagatcagggattagagaggagggggagttccagggccccagggtgaagacggaaagagacacgctgttgtccaaggagaaagccatcaggcggcacgctgttgtccaaggagaaagccatcaggcggcagggctaagggacagacaggtccaggctggggatggagaggcactgtggttcctttactcattcacagcctctggtttggggtggggtctggaatccattcaggtccgactgtgtccctaagggaacccagaacagcccagtcgcttcctgagggcagctgcttcccacgtgctgggggcctaagaatagcccccccccccccccagcaaaagggcagacaacagctgggagggggagggacctcagagcgaggctccaggcagcaaaaagccaggtcggcgaggagcggggctgcttctccactgctgtggcagcaggcccagaaccaaagccatggtctcagggaggaaaacagccaactggagaaatgtggcagaggcagaagtgagacagcaagtcttagaaacacggcagtggctagaaaaatgcagccctggggcacggacagaggatgggctatgttagaaatgtgtggcgtggccgagggcggtggctcatgcctggaatcccagcactttgggaggccgaggtgagaggatagcttgagcccaggagttcctgacccacctgggcaacatggcgaaactctgtctctactaaaaatacaaaaaattagccaggcatgatggtgcgtgctcgtgatcccagttactcaggaggctgaggtgggaggatgggatgtggaggctgtagtgagccataattttttttttttttttttcagatagaatctcactctgtcgctgagtctggagtgcagtggtacaatctcgactcactgcaacctccgcctcccgcgttcaagcaattctcctgcctcggcctcccaagtagctgggacctcaggcacatgctgccacgcccggctaattttttgtattttagtagagacagggtttcaccatgttgcccaggctggtctcaaactcctgagctcaggcaatccgcccgcctcggccccccaaagagctaggattacaggcgtgagccaccgcgcccagcccagtgagccatgattgcaccactgcactccagcctgggtgaccggagtgagaccctgtcaaaaacaaaaacaaacaaaaaaaaatggaagaaagaaagaaaaaggagagagggagggaaggagggagagagggaaggaaggaaggaaggaagcaaggaaggaaggaaggaggctgtggactacaaaatgggcctatggatagaggaaagaggtcgcaggtgacagatatgtgatgaaaggaacagaaacaaggcatcatggggaagaaaagtggcagcatgaacagtaagagaatcattacaggctgggtgcagtagctcacgcctgtaatcccagcactttggtaggctgaggccaggagtttgagaccagcctgggcaacatggtgaaaccctgtccttacaaaaaagttaaaaattagccgggatgtgataccttgtgcctgtggtcccagctacgtgggaagctgcggtggaaggattgcttgagcctgggagatcgaagcttcagtgaaccgtaattgcaccactcccttccaggctggaggacagagcaagaccccgtctctgaaaataaaaaagggcctgctttaggtggctcacacttctaatctcaacactttgggaggctaagcaagaaaactgcttgaacgcaggagttcacgatcagcctgggcaacatagtgagaccccatctccacaaaaaattaaaaaatcagcctggcatggtggcccacgcctgtaggaggtgaggtgggaggattgactgagccagggaggttgaggctatagtgaaccatgttcacaccactgcactccagcctgggcaacagagcgagaccctgtctgaaaacaaaaaagaagcatcccgtggaaggaattagcatcagaaagaaaagacagtgggagatgcagatggttggtaagagaaatgtggcagcaagtacagaaacaaggcagcaggtaggggaaatgatttgcagagtggccagacagggcagtgggggcatagacacaggacatgtgacatatgtggttataagcagagaaaggaggcagcgagtgggagaagggtagcagttacaggaattaaacaggaggctgggtgcggtggctcacgcctgtaatcccagcactttgggacgccgaggcgggcggatcacaaggtcgggaaatggagatcatcctggctaacacagtgaaacctcgtctctactgaaaatacaaaaaaaagtagccgggcgtggtggcgggccgctgtagtcccagctactcgggaggctgaggcaggagaatggtgtgaacccaggaggcagaggttgcagtgagccgagatcatgccacggcactccagcctgggcaacagagccagactccgtctcaagaaaaaaaaaaaattagccaggtgtgggagcgggtgcctgtaatcccagctacttgggaggctgaggcaggagaattgcttgaacccgggagacagaggttgcagtgagctgagatcgcaccactgcactccagcctgggccacagagtgagactccatctcaaaaaaaagaaagaaagaaagtaagcagggggcacggaaaatattgcaacagagatggaaaaaatgtgtagcaggaataaatcatgcaaatagagaagtaaggctaaggcagcaggtgagaaattagcagcagatatggaaacagaagataagagagctgaggcttaagtctatagacatctgcctgcaaatgggagaaccacggatgagtgaagatatgaggctgaagcccagagcctccctatggtgcctccccaaccccatcccaggtgtatttcgggcgctggctgatcgagggaggccctctggtggtgctcctggacgtgggtgcctcagcttgggccctggagcgctggaagggagagctctgggatacctgcaacatcggagtgccgtggtacgaccgcgaggccaacgacgctgtcctctttggctttctgaccacctggttcctgggtgaggtaggccccgtctgacacattccacccatacctgaaactacaatgaccatcagcccctgggccagaggatgggcttctccctgggcattctgggagtcatagggtcctttaatccaaggattagctctggcctttgaggacatgaacatccaagggcccaggctctactctcgatgccaacttcatttactctagtcttccaagcatagggattcttggaatcagcctcaaagtgaggctggcgggcttgcccgaggaattctaggagttgtagttctctagtgtgatattgctggactcagctctcagatgctgccctggatgctcatgaatccccagcctgacctggttttgacccccttctaggttttaagaggctcaagaagcttagtttccaggctgggcacggtggctcatgcctgtaatcccagcactttgggaggccgatgggggaagatcacgtgaggccaggagttcaagatggccaaacctcgtctttactaaacatacaaaaaaattagctgggtgtggtggtgggcacctgtaatcccaaatcccagctacttgggaggctgagacaggagaattgcttgaacctgggaggcgggaattgcagtgagctgagattgcatcacggcactccagcctgggccacagagtgagacactgtctcaaaaaaaaaaagaaaaagaaaaaaaaaaaaagaagcttaatttctcatgccctgggacaaataattgaggaactggctgctcctatggcattctgggagttgtagtccctttgccaatgttgggtgcagacagcgtacccttgagacaaggggtctttggaaactatgtccaggacctgggaacatgaaaacttcagtctgtccaatctaaccctgccaggacttagatggttggccaaaaaatcctcagttcctgtcaacccctgaggaggcagtcacttgagcccaggagttcaagaccagcctgggctgcctcagggatttacaggtccctgtccggttgggattgctgcagtgggccgctgcccactctgtgcagtagtggtgacagattgacctctccccgagtccttgtccctactggggattgccgattcttttcccaacactcgtggagacagtggccctgtccctgttgcccacagttcctggcacagagtgaggagaagccacatgtggttgctcacttccatgagtggttggcaggcgttggactctgcctgtgtcgtgcccggcgactgcctgtagcaaccatcttcaccacccatgccacgctgctggggcgctacctgtgtgccggtgccgtggacttctacaacaacctggagaacgtgagctgggaccgtggcagatgggggactgcgagtatgccaggaaaacccaaagctctggggggcccaaggggatggcaccccctcttctcccaggatccaggagtccaagtccccagacccctcctacctcagacccaggaatccagcccccagcaccaatttctcttgggaccccagtgtctggacctccagagtcttctccccaatccttctaaccggactgctgtcccctcccacccagttcaacgtggacaaggaagcaggggagaggcagatctaccaccgatactgcatggaaagggcggcagcccactgcgctcacgtcttcactactgtgtcccagatcaccgccatcgaggcacagcacttgctcaagaggaaaccaggtaggggctgggctgaagtccccagacgtgaatgaggtaggcagctgtctatgccaaagccagttgctcctcagcccaagaagcccactgtaagttgaaatagcataaaccgaaaacgtatttcggctgggcatggtggctcacacctgtaatctcagcactttgagaggccaaggcaggagaaccacttgagcccgggaatttgagaccagcctgggcaacatggcgaatccctgtctaaaatattcgccagacatggtgtgtgcctgtatccctagctactcaggaggctgaggtgggaggattgctcgagcctaggaggtcaagggtgcagtgagctgtgatcgtgccattgcatgatttgggtggcctggagagaccctgtcacagcctgggtgacacagtgagaccctgtctcaaaaaataaaaaaatgcatttaatacacctaacctactgaacatcatagcttaggctagtataccttaaatgtgcccagaacactttatgttagcctacgactgggcaaaatcatccaatacaaatctgttttattttatttttatttatttatttatttttgagacggagtctcgctctgtcgcccaggctggagtgcagtggcgctatcttggctcactgtaagctccgcctcccaggttcatgccattctcctgcctcagcctcccaagtagctgggactatacgcgcctgccaccacgcctggctaattttaatacaaacctattttataataaagtgttgaataggctgggcgcagtggctcacacctgtaatcccaacactttgggaggccaaggcgggcagatcacgaggtcaggagatcgagaccagcctggccaacatggcgaaactccatctctactaaaaatacaaaaattagccgggcgtggtggtgggtgcctgtaatcccagctactcgggaggctgaggcaggagaatcacttgaacccaggaggcggaggttgcagtgggccgagatcacaccactgcactccagcctggacaacagagcgagactccatctcaaaaaattaaaaaaaaaaagtgttgaatatctcatcaaaatccaaaattggactcatgtggatgtatgtaactttcacaccatcataaggttgaaaaatcataacttggctgggcacggtggcttacacctgtaatcccagcactttggaaggctgaggtgggcagatcacctgaggtcatgtgctcaagaccagcctggccaacattgtgagaccccctctctgccaaaaatacaaaaattaggtgggcatggtggcaggcgcctgtaatcccagccacccagctactcgggaggctgaggcaggagaatctcttgaacccaggaggcagaggttgtcgtgagccaagattgtgccattgcactccagcctgggcaacaagagcgaaactctgtctcgaaaagaaaaatcataacttggaccatcctaagtcctaagctggggaccatcagttaccatttttttacctaaagaatagagaactacagctcccagaaggctgtgggggtggtgacctgtatttgaggctctctgactatatactctggaggctaatgggaggtataatttctttcatattaatttcagatatgataaaattctgtaattggctaatgtagattggtcttatgaaagggaatggaagatcagtggactttgcttttgagaaaggttaggtcagaactgggcattcttcccagcccttagtatccgttctcagtgagtataaggtgagaactacaactcccagaaggcctttgactggttagctctatatgttccagaactttgccctaggcgctgatgggggttgtagtttttcgttgatatactttaatttctatgaggagaagaaatgattgggtccctgtaagaagcttggaagtagaggatatatcctaggagaagcaggactttggggatgtttaatcatttccatctcagggtgggctaagaggaaacaaaagaagtacaactttcccagaatcaccagtgtggatcagatccctgttagccatttgcagtagctgaggagacttatacttgtgcttgtgaacctaagcaagtaatattaggcaagaaggcatcttggagtcagggtaggtgtgtcaccaagggaactggccaggcatggtggctcacacctgtaatcccagcactttaggaggccagggcaggaagactgcttgaagccaggagtttgagatcagcttgggtaacatgacaagaccccatcactacaaaagtaaaataaataaattagccgggtgtggtagtgcacgcctgtagtgccagctactcgggaggctgaggagggaggattgcttgagcccaggaggtcagggatgcaatgagctgtgattgtgccactgctctccagcctgagcgacagagagaaaccctgtctccaaaaacaaacaaacaaacaaaaaaggtgggaggggggacctcataggaacgctcttgaaacaaaaaaattgcaaaaggcaaagggtgttttcttcatttattcattcaaccacaacattgatctgaatgaacaaataaaacatgggaccctcacccccaatcccagatattgtgacccccaatgggctgaatgtgaagaagttttctgccatgcatgagttccagaacctccatgctcagagcaaggctcgaatccaggagtttgtgcggggccatttttatgggtacgtggggcatatacctaggtcttaagagaggagggcgttgggagcctaaccatctaggtctgggggagggggcagctgggggcccagactcctgggtctgagggagggggcacctgggtattcggcctccttaattcttgagcgctggaacaatgggctcaggattaaaggaaatctccatctaaagagaagaactacaactcccaggaggccccgtgatgcctctgtattacctaagacatcctctgcccccccacccatagcttctgggatttgtagttttgaggccagggctagcgggtgagggctttgggctttaccgtgccttgtgggttctttaggcatctggacttcaacttggacaagaccttatacttctttatcgccggccgctatgagttctccaacaagggtgctgacgtcttcctggaggcattggctcggctcaactatctgctcagagtgaggcctgggctatgaggggacagggagggcaagcaaagcagtttataactagggagaacagccaggcacagtggctcacacctgtaatcccaacacttttggaggccaaggcgggaggatcacttgagcccaggagatggagaccagcctgggcaacatggtgaaaccccatctctacaaaaaatacaaaaattagccaggcatggtggctcacacgtgtagtcccagctactcgggagggtgaacggggaggatcacgcgagcccgggaggtggaggttgcagtgagccaagatcatatcactgcactccagcctgggcgacagaaaaagacgctgtctcaaaaacaaaacaaaacaaaacaaaacaaaaaattacagaacagaaacccaagaagccaggaagatgggggtaggaaagcccctgagtatggtggggggccgtgaggggagtatagagacccagaaagaaggtcagagtccaggtggggactgtcctataattctccttgacaggaatgggtatggcaggatcccagtggtcttgacagaaaggctggctggttccaggcttcccccacatgatcctggcctccccctcctttctttctgcgcaggtgaacggcagcgagcagacagtggttgccttcttcatcatgccagcgcggaccaacaatttcaacgtggaaaccctcaaaggccaagctgtgcgcaaacagctttggttagcagccctcgctccggcccctggcgcagcccactcccagatgcatgctttgggtcctgtgtttctcctagagtctcagttttttgttttgtttgtttgtttgtttgtttgtttttgagacagtctcactctgtcgcccaggctggagtgtagtggtgcgatcttggctcactgcaacctccacctcctgggttcaagcaagtcatctgcctcagcctctcgagtagctgggactacaggtgcacaccaccatgcctggctaatttttgtattttcagtagagatggggtttcaccacattggccagactagtctcaaactcctgatctcgtgatctgcccgcctcagcctcccaaagtgctggaattacaggcatgagccaccgcacccggccctcttttttttttttattttgagatggagttttgctctgtcgcccaagctggagtgcaatggcatgatctcggctcactgcaacctctgcctcctgggttcaagcgattttcctgcctcagcctctgagtagctgggactacaggggtgtgccaccacacctggctaactttttatttttattagagacaggttttcactatattggccaggctggtcttgaactcctgacctcaggtgttccgcctgcctcagcctcccaaagtgctgggattccaggcgtgagccaccacacctagcctttttttgtatttttagtagagatggggtttcaccatgttggccaggctgatcttgaacacctgacctcaggtgatccagccgccttggcatcccaaagtgctgggattacaggggtgagccactgcgcctggcttagtttctttttcttttctctgatttttttttttttttgaaacagagtctcactgttgcccaggctggagtgcagtggcgtaatctcagctcactgtaacctccgcctcccagcaaagctcagtttcttcatctgtaaaaccgttcattcattagcagagatactcactgagcatctactatgtgctagctaatttttatatttttagcaccgatgggatttcaccacgttgaccaggctggtcttgaactcctgacctcaagtgacctgccctcctcatgtattccaggtcctgggaatacagctgtgaaccagaaagataagatccctttcctcatggagcttgtattctagaaaatcctgtagacggaatttacttttgggcaaaaataaagcagaactggaatatgagacggggttgtcaggacaggccacactgagaaagtgttattgggcagagacgaggaaaggtgacgagggagcaagccctgtgggtatctgaggaacagcaaactcgaaggccccgaggcatgattgagacgcggtggggagtcccatggggctggagtgacatgtctcatagagaaggggtagaaagtgaggcaagatggagggcacctgtagtgccagctacaggaggcaggaggatcattttggccctggaggttgaggctgtagtgaggcatgattgcgccactgcactccagcctaggcaacagagtgagactctgtctcaaaaaaataaaaaagaagtcgggcgtggtggctcacacctgtaatcccggcactttgggaggccgaggcgggtggatcacctgaggtcgggagtttgagaccagcttgaccaacatggtgaaaccccgtctttcctaaaaataaaaaaaatcagcagggcgtggtgacacacatctgtagtcctagctactcgagaggctaagcaggagaatcgctcgaacccgggaggcagagattgcagtgagccaagatcgcgccaatgcactccagcatgggtgacagtgagactcggtctcaaaaaaaaaaaaaaaaaaaagaaagaaagaggctgggcgcggtggctcacacctgtaatcccagcactttgggaggctgaggagggcagatcacttgaggtcaggagttcgagatcagcctggtcaacgtggtgaaatcccatcggtactaaaaatataaaaattagccagatgtggtggcgcacgcttgtaattgcagctactcaggaggctgaggcaggagaatttcttgaacctagaaagtggccgagattgcgccatcctgggcgacagagcaagactctgtctcaaaaaaaaaaaaaaaaaaaaaaaaaaaaaaaaaaaaaaaaagaaaagaaaaaagaaaaagagacaaagaaagaaaaataaatgaggccagagctatgggaggattttaagtggaggagtgaccgtggggctgttgtgtgacactgctagctttacttgtgtgcctaagtggtcctttctcagaatcttactttcttttcgtataaaatggggcttagcattgccatctgcaggacaagtacaagtcctaataatagctgacatttctggaaggcttgccatgtgtactttttggcatgacatcattgggtcctcatcgcaaacctctgaggttgattctattttcatcctcctctgaaaaatgagtcactgcagtcagagagggaaggccacctgtccctgaccacacagctgatgtcaggcacgtgggtcctaagccttccagggcctgccccctgggtccccatcctccagcctggaggccccagggcacggcttccctgctcacacctcagtttccttgctatcctagaaacctaagggtagctgggcgcggcagctcatgcctgtaattccagcactttgggaggccgaggtggccaattaccagccagaggtcaggagttcgagaccagcctggccaacgtggtgaaaccccgtctctactaaagttacaaaaattagccgggcatggtggcaggtgcctgtaatcccggctactcaggaggctgaggcaggagaattgcttgaacctgagaggcagaggttgcagtgagccaagatcgcaccactgcgctccagcctggacgacagagtaactctgtcaataataataataataataataaataaactgctgggcacagtggctcaagcctctaatcccagtactttgggaggccgaggtgggcagattacctgaggttgggagtttgagaccagcctgaccaacatggagaaaccccgtctctactaaaaatagaaaattagccgggcgcggtggctcatgcctgtaatcccagctactcgggaggctgaggcaggagaattgcttgaacctgggaggcagaggttgcagtgagccgagatcacgccattgcattccagcctgggcaacaagagccaaactccgtctcaaaataaacaaacaaactaactaaagaagcctaacagtaaatggcagctggtgtgtatgtgaccctgttgctctgcttcctccagggacacggccaacacggtgaaggaaaagttcgggaggaagctttatgaatccttactggtgtgagtgccccaccctcagccctgtgccctcctaggccctgactaacccctctcattactccgttctcacatgcatgcccctgcttgccttgcagtgggagccttcccgacatgaacaagatgctggataaggaagacttcactatgatgaagagagccatctttgcaacgcaggtatggattggacctctgtgcagagagatagcagttcctggcagccccagaggcagcttgccaggccagctcagaccccagagattgctgggagtcctgctttctcctgcagccctttatgaagggatctattctgaggtccacagaagggcacgtgctgactcgtgcaacttcagttgctggaggcgaggcacttagggtgggctgttttctgtggcttattctgccacgagggttgctgggacgtgtggtttctctgggattctggggtcaatgagcaaaaggaagcttatttgtttatttatttttattatatttatttatttattttgagatggagtctcgctctgtcgcccaggctggagtgcagtggcacgatctcggctcactgcaacctctgcctcctgggttcaagcaatactcctgccttggcctcccaagtacctgggattacaggcacatgccaccacacccagctaatttatatatttttagtagaaacgagatttcaccatgttggccaggccagtctcaagctcctgacctcaagtgttctgtctgcctcagcctcccaaagtgctgagtttacaagcgtgagtccctgttcccagcccaaagggaagtttaaaaggaagtgtagaaatgtaataaagggccaggtgtggtggctcatgcctgtaatctcagcactttgagaggccaaagcaggaagatcacttgagaccaggaggctgaggctgcagtgagccatgactgtgccactgtacaccagcctgggggacagagccagatcccacactagccccccacccacccccaaaagaaagtcaaggcccagcttggtagctcacacctgtcagtattcccagcactttgggaggctgaggtgggaggatcgcttgagcccaggagtttgagaccagcctgggcaacatgatgaaaccctgtctctaccaaaaatacaaaaatgagctgggcatagtggcatacacctgttatcccagctacctgggaggctgaggccagaggatgccttgagctcaggaggtcaaggctgcagtgagctatgattatgccgctgcagtgagctatgattatgccactgcactccagactgggcaacagagcgaggcggacacatacacacacacacgaaagaaggaaaagaaagaaaagaaaaggtcaagacagccataaaagaattacaactctcagctctccttgggccttgctgcacacggctccacctctacccctaaaactgctgggagtggtagttttatcgggccactttagggacgcagtcaggaggtgagcaaaagcacccagcattctccagaaaacattgcaaactctcagcagctgcggtttcttatttccagaggctgtgtgttggtccccagacacccctgggaattgtagctgctttagatccctaacttcagagagaattggcatttataaaatgagaacttaccgtcattctattgagtctaggggcccaaaaaactacaactcccagcagcccctgctggctttctggggcattgacgcttcccttgtccagaggcttctgggagttagagttctttcattctctggggtccagggacttcagtacttgtggtctacattggggagccatttcctggggaatggaaacccagacagctaagttgtagaaacaaaacgtgaactgcttttggctaacctataatttccaatagtccctaaagcagcccacctcattatgaatgtttctgccatcgggatgctgggagttgtagtttctcgggcccctagactcagtagagtggtggtaagtaaaatctttaatgagctatgatggaacagttgctaagaactatacaccccagcagtcctcaggacttcctatcacactagctctgtcttgctccagagactcttggaaattgtggtttctttgggcctttgttagggttggaggtgaattttcttttttcttcttttttttttttttttttttttttgagacggagtctcgctctgtcgcccaggctggagtgcagtggcgcgatcttggctcacttcaacctccgcctcccggattcatgccgttctcctgccccagcctcctgaggcacccaccaccacgcctggctaattttttgtatttttagtagagacggggtttcaccgtgttagccaggatggtctcgatctcctgacctcgtcatcctcctgcctcggcctcccagagtgctgggattacaggcgtgagccaccacgcctggtggttggaagtgaattttcataaggaaactacaactcccagcagtctccaaagcttgctgccatattggcacagtctccacccccattgactggggatagttatatttcctttgggtttctttaataatagagcccagagtacagaacaaggtagctgcaactcctcatagtccttggaggtaagggagttgctaacacggctttgcctcaaagacagctgggaattctagttctttgaagctcatggtggttaagggaaggaaaacatttccaggccaggtgtggtggctcatgtctgtaatcccagcacttcgggaggccaaaacggatgcatcgcttgagcccatgagttcgagaccaacttggccaacatagtgaaaccccatctctattaaaaaaaaaaaaaaaaaaaattaggctgagcgcaatggctcacgcctgtaatcccagcactttgggaggccaaggcaggtggatcacgaggtcaggagatctagaccatcctgatttaacacagtgaaacctcgtctctactaaaaatacaaaaaattaaccgggcgtggtggtaggcgcctgtagttccagctactcgggaggctgaggcaggagaatggcatgatcctgggaggtggagcttgcagtgagccgagattgtgccactgcattccagcctgggcgacagagcgagactccgcctcaaaaataaataataataatttaaaagaaaagaaagaaaacctttacaggttgtactagtgggaatccacaactcctggtgatcacttgggtttgttgccccacgtccggtgcatttgtggtctccttggctcccccagggtccgcatggctcatgaggaagtagggagttctctgtcccttccatgaccccttacccttcttgtggctcctgcagcggcagtctttcccccctgtgtgcacccacaatatgctggatgactcctcagaccccatcctgaccaccatccgccgaatcggcctcttcaatagcagtgccgacagggtgaaggtgagggcatttggtcagggctgggttgggcacggcagagggaaggggttgggtcctgggcctcacacactccattcccctataagttttatcaaaggtattgctgtggttagaaagaaccctggcttctgaggcaggcagacctgggtttgaacattggtcctgccaaacacatgctgtgtgatgctagacaagctttttaccctctctgggccaccttgggatctcagggcttagctaaataaggcacttgggctgagtccttctttttcactaccaggtgattttccacccggagttcctctcctccacaagccccctgctccctgtggactatgaggagtttgtccgtggctgtcaccttggagtcttcccctcctactatgagccttggggctacacaccgggtgagtgtagtgggcaggggacagcgtggtcatggcatcctagtcagagctagcatgtcttggggcgaggcactggccttctctgagcctgttgccttctttgcaaaacaggaacaatggtaatcacctgttctgctacagcgcgtgcttttgtgatacaatagctcatgtattgagaaactagaagactgggttttgaggactagtgaactggatgtcacagttcacactgctttctcccagaaagcagtggccccccaaatagtggcaatgaaatgcacaattcacaaatacagccgagtgtggccaagtctcctcgtaagacgttcccagtgcccatcaactccaccttcctcttgttggttcacattagccagtgtttttaaagctaaataaggctgggcgtggtggctcatgcctgtaatcccagcacttggggaggccaagatgggcagatcatgaggtcaggagtttgagaccagcctggccaatatagtgaaaccctgtctctactaaaaatacaaaaattagccaggtgtggtggtacgcacctgtagtctcagctacttgggaggctgaggcagagaattgcttgaacttgggaggcggaggttgcagtgagctgagatcatgccactgcactccggcagtgctgtgctctgggtgacagagcgagactccgtctcaaaaaaaaaaaaaaaaaaaaattaaagctaaattagtgccatttcctaatttattagtaatttaacaagtcctgcaaactgtgcttgcatgataattaggagtcgcggtcagccccaattccctttttccataggccttgttttatagatagattgatagatagtactagtctgttttcacaccgctataaaaaaaaaatccaagactgggtaatttataacggaaagaggtgtaattgactcaccgttccacatgtctggagaggcctcagaaaactcagtcatggcagaaggggaagaaagaagcttcttctcatggcggcaggagggagaagtatgtgagggtgcaggaaaaacgaacatttataaaaccatgagatctcgtgagaattcactcactatcatgagaacagcggcgggggaaccacccccgtaatccaatcatttccctccctcgacacgtggggactacattttgagatgaaatttgggggggaacacagagtcaaactatatcataaatatatatttaatacattttactatttgtttcttttttgagatggggttattactctgttgccaaggctcacctggaactcctaggttcaggtgcttctgcctcagcctcttgagtatctgtcattataggtgcatcccaccatgcctgacagatgtattatatttagtgcctatttttgcagtttacagatgtttttaggaaaacttacataagaattatagatcaggccaggcatggtggctcacgcctataatccccacactttgggaggccgaggtgggaggatcacttgaggacatgagtttgagaccagcctggccaacatggtgaaaccctatctctactacaaatacaaaaattagctgggggtggtggcaggcacctgtaatcccagcccttcgggaagttgaggtgggagaatcgtttgaaccccagaggcagagattgcagtgagctgagatcgcgccactgcactccagcctgggcgacagagtcagaccctgtctaaaataataataataataattataggtcaggggcagtggctcacacctataatcctagcatcttggaaggctgaggtgggaggatagcttgagctcaggagttcaagaccagcctggacaacatggtgagaccctgtctctataaaagatttttttttttttttgagacagagtcttgctctattgccaggctggagtgcagtggcacagtcttggctcactgcaaccgcctcccgggttcaagtgattctcctgcctcagcctccagagtagctgggactataggcgcctgccaccacacccagctaatttttgtatttttattagacacagggtttcaccatgttggccaggatggtttttttttttttctcttcttgacctcgtgatccacccgccttggcctcccaaagtgctgggattacagacatgagccaccgtgcccggccttttttttttttatttttaattagccatgcgtagtgttgtgtgctcgtagtcccagcctcttgggtggctgaggtgggaggattgcttgagcctaggaggtcaaggctgcagtgagctatgatcaagccactgtcctccaggttgggtgataaagtgagaccttgtctcgagaaaaaaaaaaaaaaagcattgggccaggcgcagtggctcacacctataatttgaccactttgggaagccaagacggatggatcacctgaggtcaggagttcaagacctgcctggccaacatggtgaaaccctgtctatactaaaaaatacaataattaactgggcatggtggtgtgtgcctgtagtcccagctactcgggtggctaaggcacgaaaatcgcttgaacccgggaggtgaaggttgcagtgagccgagattgtgccactgcactacagcttgggtgacagagtgagaccctgtctcgaaagaaaaaaaaaaaagcataaaaatccatcaaaaaattataatacattccttgaactatttctcaaggttgttaaaggtattaaacaagacgtactagatgctctgtacacagggatactaataatgagagaccttatcttaccccccatcaaaatagactaagtccgtacaagatactggcacaagaaaggatcttacaggttgtgacaattaagtagaatgatggaccttggcccgatcctacaggttgtgagagttaagtcaaatggatattgggatgctcaataaattagcatccttatctcccaactatggactttcccgcatcttggagcaagagcaagtaattctcttttctgagcctcttagcgtcccctctgagaaatagggaaatgcacagcctggttgtgggggctcagcgacgctccgcacagcgcctggcacttggtacaggcgccagtagagggcggtgttgaggcgtctattgcgattaagacggtaggcgatgagggaagctaagtgggtctctctcctgccttcccgcagctgagtgcacggttatgggaatccccagtatctccaccaatctctccggcttcggctgcttcatggaggaacacatcgcagacccctcagcttacggtcagcgcccaggcccctgaggattctggaagggggcttgagaacagtgactcctggatcctgggaaggaggagcttgcacccttggagaccaggggcaccaggaaatgggggggctctcgggccgctgggagaggaggggtcctggtgccacagagtcctggagaccatgaagatctccccaggatgttttctgaacctgggtcctggcctccacaggtatctacattcttgaccggcggttccgcagcctggatgattcctgctcgcagctcacctccttcctctacagtttctgtcagcagagccggcggcagcgtatcatccagcggaaccgcacggagcgcctctccgaccttctggactggaaatacctaggccgggtaggacccccactttcctatcctctcctggcaaatcagcagctcctggctaggggtctttggtgcagggtgcagggtctcatcctacttgtaacagttgctgtccctttaagcaatgaaccaggccgatcgcgatggtggctcatggttgtaatcccagcactttgggaggcctaacaggaaggatcgcatgagctcaggagttaagagaccagcctgggcaacattttatttttactaaaaataaaaaaaaatcagccgagcgtgatggtgcgtgcctgtagtcccagctactggggaggctgaggtggtagggtcgcttgagccccggaggttgaggctgcagtgagccttgttcaaacccactgcactccatcctagagtaacagaacaagaccgtgtttaaaaagaaaaaaagaacattggtcaggcgttctcatttgcataagggtgtggccaaagaggagactcacttgagaattcggcccctgtttgaggggtatggctcagaaactgtccattcacaggtctgcttatctacataaggggtggagtcagatagatggattatttgtatggggtgcagcagtgtgctcatctgcataaagggtgtggccaagacccccatcatctgcctgggggtggggcctggctctcacatcctctgccccctctcctcctttcccctagtactatatgtctgcgcgccacatggcgctgtccaaggcctttccagagcacttcacctacgagcccaacgaggcggatgcggtgagtggaccctggatttctgcttagccaggagctaaagggctgggcttcggtggggtgggggtccctcctggagtgggaaggcctagaggtggctggatgcctgggtgggactgtgaggtcctcagctcaccctggtttgcacccacatcgccgtatgcaggcccaggggtaccgctacccacggccagcctcggtgccaccgtcgccctcgctgtcacgacactccagcccgcaccagagtgaggacgaggaggatccccggaacgggccgctggaggaagacggcgagcgctacgatgaggacgaggaggccgccaaggaccggcgcaacatccgtgcaccagagtggccgcgccgagcgtcctgcacctcctccaccagcggcagcaagcgcaactctgtggacacggccacctccagctcactcagcaccccgagcgagcccctcagccccaccagctccctgggcgaggagcgtaactaagtccgccccaccacactccccgcctgtcctgcctctctgctccagagagaggatgcagaggggtgctgctcctaaacccccgctccagatctgcactgggtgtggccccgcagtgcccccacccagtccgccaaacactccaccccctccagctccagtttccaagttcctgcactccagaatccacaaagccgtgcctttctctggctccagaatatgcataatcagcgccctggagtcccctgggcctggaccgcttcccagaggccaggaatctgccattactctgcggtggtgccagaggttttaggaaacctggcatggtgctttcaggtctggggcttttagagccccccgtgtggcttacaaattctacagcatacagagcaggccacgctcaggcccggcatgcgggccaccaagttctggaaaccacgtggtgtccctgcgaatggggcgatcaagtccagagccggggcactttcagagtttgaaggtaactgagagcagatggtcctccatttcaactccagaagtggggctctgggagggatgttctagccctccctggcatgtcagagccaggctctgcctggaggatccctccatccggctcctgtcatcccctacactttggccaagcaagaggtggtagaaccacttggctgctcattccttctggaggacacacagtctcagtccagatgccttcctgtctttctggccctttctggaccagatcctactcttcctttctaaatctgagatctccctccagggaatccgcctgcagaggacagagctggctgtcttcccccacccctaacctggcttattcccaactgctctgcccactgtgaaaccactaggttctaggtcctggcttctagatctggaaccttaccacgttactgcatactgatccctttcccatgatccagaactgaggtcactgggttctagaacccccacatttacctcgaggctcttccatccccaaactgtgccctgccttcagctttggtgaaagggagggcccctcatgtgtgctgtgctgtgtctgcaccgcttggtttgcagttgagaggggagggcaggaggggtgtgattggagtgtgtccggagatgagatgaaaaaaatacatctatatttaagaa

SEQ ID NO: 15-18 - skipped (4 entries)

SEQ ID NO: 19 - DNA, 20 bp, synthetic construct
  source 1..20: mol_type = other DNA
gtctattactcttgcctgtg

SEQ ID NO: 20 - DNA, 20 bp, synthetic construct
  source 1..20: mol_type = other DNA
gaaacctcgcagccgccagg

SEQ ID NO: 21 - DNA, 20 bp, synthetic construct
  source 1..20: mol_type = other DNA
gaccgcacccctgccccgaa

SEQ ID NO: 22 - DNA, 20 bp, synthetic construct
  source 1..20: mol_type = other DNA
ggtgcccgacgggaagcttg

SEQ ID NO: 23 - DNA, 20 bp, synthetic construct
  source 1..20: mol_type = other DNA
cggaggtgtctagggaatgc

SEQ ID NO: 24 - DNA, 20 bp, synthetic construct
  source 1..20: mol_type = other DNA
tgcggtttaaaggcatggct

SEQ ID NO: 25 - DNA, 20 bp, synthetic construct
  source 1..20: mol_type = other DNA
gccacttcgaagagcactgc

SEQ ID NO: 26 - DNA, 20 bp, synthetic construct
  source 1..20: mol_type = other DNA
agtagttgtcgccccattcg

SEQ ID NO: 27 - DNA, 20 bp, synthetic construct
  source 1..20: mol_type = other DNA
tgtacggccccaccaggaag

SEQ ID NO: 28 - DNA, 20 bp, synthetic construct
  source 1..20: mol_type = other DNA
acgccctgctccgtgtacgg

SEQ ID NO: 29 - DNA, 20 bp, synthetic construct
  source 1..20: mol_type = other DNA
ctccctcgatcagccagcgc

SEQ ID NO: 30 - DNA, 20 bp, synthetic construct
  source 1..20: mol_type = other DNA
agggcctccctcgatcagcc

SEQ ID NO: 31 - DNA, 20 bp, synthetic construct
  source 1..20: mol_type = other DNA
cactccgatgttgcaggtat

SEQ ID NO: 32 - DNA, 20 bp, synthetic construct
  source 1..20: mol_type = other DNA
tcgccgggcacgacacaggc

SEQ ID NO: 33 - DNA, 20 bp, synthetic construct
  source 1..20: mol_type = other DNA
ggcaccggcacacaggtagc

SEQ ID NO: 34 - DNA, 20 bp, synthetic construct
  source 1..20: mol_type = other DNA
agtgggctgccgccctttcc

SEQ ID NO: 35 - DNA, 20 bp, synthetic construct
  source 1..20: mol_type = other DNA
gtgcctcgatggcggtgatc

SEQ ID NO: 36 - DNA, 20 bp, synthetic construct
  source 1..20: mol_type = other DNA
attcgagccttgctctgagc

SEQ ID NO: 37 - DNA, 20 bp, synthetic construct
  source 1..20: mol_type = other DNA
cggcgataaagaagtataag

SEQ ID NO: 38 - DNA, 20 bp, synthetic construct
  source 1..20: mol_type = other DNA
actcatagcggccggcgata

SEQ ID NO: 39 - DNA, 20 bp, synthetic construct
  source 1..20: mol_type = other DNA
cttgttggagaactcatagc

SEQ ID NO: 40 - DNA, 20 bp, synthetic construct
  source 1..20: mol_type = other DNA
ggcaaccactgtctgctcgc

SEQ ID NO: 41 - DNA, 20 bp, synthetic construct
  source 1..20: mol_type = other DNA
tcatgtcgggaaggctccca

SEQ ID NO: 42 - DNA, 20 bp, synthetic construct
  source 1..20: mol_type = other DNA
gaagaggccgattcggcgga

SEQ ID NO: 43 - DNA, 20 bp, synthetic construct
  source 1..20: mol_type = other DNA
gacagccacggacaaactcc

SEQ ID NO: 44 - DNA, 20 bp, synthetic construct
  source 1..20: mol_type = other DNA
ggattcccataaccgtgcac

SEQ ID NO: 45 - DNA, 20 bp, synthetic construct
  source 1..20: mol_type = other DNA
ccgccggtcaagaatgtaga

SEQ ID NO: 46 - DNA, 20 bp, synthetic construct
  source 1..20: mol_type = other DNA
ggaatcatccaggctgcgga

SEQ ID NO: 47 - DNA, 20 bp, synthetic construct
  source 1..20: mol_type = other DNA
acgctgccgccggctctgct

SEQ ID NO: 48 - DNA, 20 bp, synthetic construct
  source 1..20: mol_type = other DNA
ccagaaggtcggagaggcgc

SEQ ID NO: 49 - DNA, 20 bp, synthetic construct
  source 1..20: mol_type = other DNA
cgtaggtgaagtgctctgga

SEQ ID NO: 50 - DNA, 20 bp, synthetic construct
  source 1..20: mol_type = other DNA
ggcgacggtggcaccgaggc

SEQ ID NO: 51 - DNA, 20 bp, synthetic construct
  source 1..20: mol_type = other DNA
cgtcctcactctggtgcggg

SEQ ID NO: 52 - DNA, 20 bp, synthetic construct
  source 1..20: mol_type = other DNA
cacggatgttgcgccggtcc

SEQ ID NO: 53 - DNA, 20 bp, synthetic construct
  source 1..20: mol_type = other DNA
gcgcttgctgccgctggtgg

SEQ ID NO: 54 - DNA, 20 bp, synthetic construct
  source 1..20: mol_type = other DNA
ggccgtgtccacagagttgc

SEQ ID NO: 55 - DNA, 20 bp, synthetic construct
  source 1..20: mol_type = other DNA
gggcggacttagttacgctc

SEQ ID NO: 56 - DNA, 20 bp, synthetic construct
  source 1..20: mol_type = other DNA
ggcacggctttgtggattct

SEQ ID NO: 57 - DNA, 20 bp, synthetic construct
  source 1..20: mol_type = other DNA
ccgcatgccgggcctgagcg

SEQ ID NO: 58 - DNA, 20 bp, synthetic construct
  source 1..20: mol_type = other DNA
gatcgccccattcgcaggga

SEQ ID NO: 59 - DNA, 20 bp, synthetic construct
  source 1..20: mol_type = other DNA
tgaaagtgccccggctctgg

SEQ ID NO: 60 - DNA, 20 bp, synthetic construct
  source 1..20: mol_type = other DNA
ggagccggatggagggatcc

SEQ ID NO: 61 - DNA, 20 bp, synthetic construct
  source 1..20: mol_type = other DNA
agagcagttgggaataagcc

SEQ ID NO: 62 - DNA, 20 bp, synthetic construct
  source 1..20: mol_type = other DNA
ggttctagaacccagtgacc

SEQ ID NO: 63 - DNA, 20 bp, synthetic construct
  source 1..20: mol_type = other DNA
tccggacacactccaatcac

SEQ ID NO: 64 - DNA, 20 bp, synthetic construct
  source 1..20: mol_type = other DNA
gttccgggcccccatccact

SEQ ID NO: 65 - DNA, 20 bp, synthetic construct
  source 1..20: mol_type = other DNA
tgaaaccccggcagcttccc

SEQ ID NO: 66 - DNA, 20 bp, synthetic construct
  source 1..20: mol_type = other DNA
tgactaacttaggacttccc

SEQ ID NO: 67 - DNA, 20 bp, synthetic construct
  source 1..20: mol_type = other DNA
accccctcatggccaatcca

SEQ ID NO: 68 - DNA, 20 bp, synthetic construct
  source 1..20: mol_type = other DNA
aggccccggccgaggtccat

SEQ ID NO: 69 - DNA, 20 bp, synthetic construct
  source 1..20: mol_type = other DNA
tcccagcaccgctagaaggt

SEQ ID NO: 70 - DNA, 20 bp, synthetic construct
  source 1..20: mol_type = other DNA
tttctccttggacaacagcg

SEQ ID NO: 71 - DNA, 20 bp, synthetic construct
  source 1..20: mol_type = other DNA
cccttagggacacagtcgga

SEQ ID NO: 72 - DNA, 20 bp, synthetic construct
  source 1..20: mol_type = other DNA
caaggtatcacatcccggct

SEQ ID NO: 73 - DNA, 20 bp, synthetic construct
  source 1..20: mol_type = other DNA
tccgtggttctcccatttgc

SEQ ID NO: 74 - DNA, 20 bp, synthetic construct
  source 1..20: mol_type = other DNA
ggtggaatgtgtcagacggg

SEQ ID NO: 75 - DNA, 20 bp, synthetic construct
  source 1..20: mol_type = other DNA
gttagattggacagactgaa

SEQ ID NO: 76 - DNA, 20 bp, synthetic construct
  source 1..20: mol_type = other DNA
actcgcagtcccccatctgc

SEQ ID NO: 77 - DNA, 20 bp, synthetic construct
  source 1..20: mol_type = other DNA
ggcgaatattttagacaggg

SEQ ID NO: 78 - DNA, 20 bp, synthetic construct
  source 1..20: mol_type = other DNA
gcctcaaatacaggtcacca

SEQ ID NO: 79 - DNA, 20 bp, synthetic construct
  source 1..20: mol_type = other DNA
cctaggatatatcctctact

SEQ ID NO: 80 - DNA, 20 bp, synthetic construct
  source 1..20: mol_type = other DNA
ggtgagggtcccatgtttta

SEQ ID NO: 81 - DNA, 20 bp, synthetic construct
  source 1..20: mol_type = other DNA
gtccagatgcctaaagaacc

SEQ ID NO: 82 - DNA, 20 bp, synthetic construct
  source 1..20: mol_type = other DNA
ggctgctaaccaaagctgtt

SEQ ID NO: 83 - DNA, 20 bp, synthetic construct
  source 1..20: mol_type = other DNA
ccgtctacaggattttctag

SEQ ID NO: 84 - DNA, 20 bp, synthetic construct
  source 1..20: mol_type = other DNA
ccacggtcactcctccactt

SEQ ID NO: 85 - DNA, 20 bp, synthetic construct
  source 1..20: mol_type = other DNA
gaggtttgcgatgaggaccc

SEQ ID NO: 86 - DNA, 20 bp, synthetic construct
  source 1..20: mol_type = other DNA
gggcactcacaccagtaagg

SEQ ID NO: 87 - DNA, 20 bp, synthetic construct
  source 1..20: mol_type = other DNA
gtgtccgcctcgctctgttg

SEQ ID NO: 88 - DNA, 20 bp, synthetic construct
  source 1..20: mol_type = other DNA
accgcagctgctgagagttt

SEQ ID NO: 89 - DNA, 20 bp, synthetic construct
  source 1..20: mol_type = other DNA
gttagccaaaagcagttcac

SEQ ID NO: 90 - DNA, 20 bp, synthetic construct
  source 1..20: mol_type = other DNA
agcgatgcatccgttttggc

SEQ ID NO: 91 - DNA, 20 bp, synthetic construct
  source 1..20: mol_type = other DNA
cccggtgtgtagccccaagg

SEQ ID NO: 92 - DNA, 20 bp, synthetic construct
  source 1..20: mol_type = other DNA
ggctaatgtgaaccaacaag

SEQ ID NO: 93 - DNA, 20 bp, synthetic construct
  source 1..20: mol_type = other DNA
ggtggttcccccgccgctgt

SEQ ID NO: 94 - DNA, 20 bp, synthetic construct
  source 1..20: mol_type = other DNA
tattgagcatcccaatatcc

SEQ ID NO: 95 - DNA, 20 bp, synthetic construct
  source 1..20: mol_type = other DNA
ccgtgcactcagctgcggga

SEQ ID NO: 96 - DNA, 20 bp, synthetic construct
  source 1..20: mol_type = other DNA
atcggcctggttcattgctt

SEQ ID NO: 97 - DNA, 20 bp, synthetic construct
  source 1..20: mol_type = other DNA
gactccaccccttatgtaga

SEQ ID NO: 98 - DNA, 20 bp, synthetic construct
  source 1..20: mol_type = other DNA
cagtgaaacctcgcagccgc

SEQ ID NO: 99 - DNA, 20 bp, synthetic construct
  source 1..20: mol_type = other DNA
attgcaagaccgcacccctg

SEQ ID NO: 100 - DNA, 20 bp, synthetic construct
  source 1..20: mol_type = other DNA
gctggtgcccgacgggaagc

SEQ ID NO: 101 - DNA, 20 bp, synthetic construct
  source 1..20: mol_type = other DNA
ccccggaggtgtctagggaa

SEQ ID NO: 102 - DNA, 20 bp, synthetic construct
  source 1..20: mol_type = other DNA
acaaagtgcggtttaaaggc

SEQ ID NO: 103 - DNA, 20 bp, synthetic construct
  source 1..20: mol_type = other DNA
caggccacttcgaagagcac

SEQ ID NO: 104 - DNA, 20 bp, synthetic construct
  source 1..20: mol_type = other DNA
caggaagtagttgtcgcccc

SEQ ID NO: 105 - DNA, 20 bp, synthetic construct
  source 1..20: mol_type = other DNA
ccgtgtacggccccaccagg

SEQ ID NO: 106 - DNA, 20 bp, synthetic construct
  source 1..20: mol_type = other DNA
tcacgccctgctccgtgtac

SEQ ID NO: 107 - DNA, 20 bp, synthetic construct
  source 1..20: mol_type = other DNA
cctccctcgatcagccagcg

SEQ ID NO: 108 - DNA, 20 bp, synthetic construct
  source 1..20: mol_type = other DNA
ccacggcactccgatgttgc

SEQ ID NO: 109 - DNA, 20 bp, synthetic construct
  source 1..20: mol_type = other DNA
ggcagtcgccgggcacgaca

SEQ ID NO: 110 - DNA, 20 bp, synthetic construct
  source 1..20: mol_type = other DNA
cacggcaccggcacacaggt

SEQ ID NO: 111 - DNA, 20 bp, synthetic construct
  source 1..20: mol_type = other DNA
gcgcagtgggctgccgccct

SEQ ID NO: 112 - DNA, 20 bp, synthetic construct
  source 1..20: mol_type = other DNA
gctgtgcctcgatggcggtg

SEQ ID NO: 113 - DNA, 20 bp, synthetic construct
  source 1..20: mol_type = other DNA
ccccgcacaaactcctggat

SEQ ID NO: 114 - DNA, 20 bp, synthetic construct
  source 1..20: mol_type = other DNA
gccggcgataaagaagtata

SEQ ID NO: 115 - DNA, 20 bp, synthetic construct
  source 1..20: mol_type = other DNA
gaactcatagcggccggcga

SEQ ID NO: 116 - DNA, 20 bp, synthetic construct
  source 1..20: mol_type = other DNA
cgtcagcacccttgttggag

SEQ ID NO: 117 - DNA, 20 bp, synthetic construct
  source 1..20: mol_type = other DNA
tccgcgctggcatgatgaag

SEQ ID NO: 118 - DNA, 20 bp, synthetic construct
  source 1..20: mol_type = other DNA
cttgttcatgtcgggaaggc

SEQ ID NO: 119 - DNA, 20 bp, synthetic construct
  source 1..20: mol_type = other DNA
gcactgctattgaagaggcc

SEQ ID NO: 120 - DNA, 20 bp, synthetic construct
  source 1..20: mol_type = other DNA
gccccaaggctcatagtagg

SEQ ID NO: 121 - DNA, 20 bp, synthetic construct
  source 1..20: mol_type = other DNA
agccggagagattggtggag

SEQ ID NO: 122 - DNA, 20 bp, synthetic construct
  source 1..20: mol_type = other DNA
tgcggaaccgccggtcaaga

SEQ ID NO: 123 - DNA, 20 bp, synthetic construct
  source 1..20: mol_type = other DNA
cgagcaggaatcatccaggc

SEQ ID NO: 124 - DNA, 20 bp, synthetic construct
  source 1..20: mol_type = other DNA
tgatacgctgccgccggctc

SEQ ID NO: 125 - DNA, 20 bp, synthetic construct
  source 1..20: mol_type = other DNA
ttccagtccagaaggtcgga

SEQ ID NO: 126 - DNA, 20 bp, synthetic construct
  source 1..20: mol_type = other DNA
ggtagcggtacccctgggcc

SEQ ID NO: 127 - DNA, 20 bp, synthetic construct
  source 1..20: mol_type = other DNA
gcgagggcgacggtggcacc

SEQ ID NO: 128 - DNA, 20 bp, synthetic construct
  source 1..20: mol_type = other DNA
cctccagcggcccgttccgg

SEQ ID NO: 129 - DNA, 20 bp, synthetic construct
  source 1..20: mol_type = other DNA
tctggtgcacggatgttgcg

SEQ ID NO: 130 - DNA, 20 bp, synthetic construct
  source 1..20: mol_type = other DNA
gttgcgcttgctgccgctgg

SEQ ID NO: 131 - DNA, 20 bp, synthetic construct
  source 1..20: mol_type = other DNA
acgctcctcgcccagggagc

SEQ ID NO: 132 - DNA, 20 bp, synthetic construct
  source 1..20: mol_type = other DNA
gggtttaggagcagcacccc

SEQ ID NO: 133 - DNA, 20 bp, synthetic construct
  source 1..20: mol_type = other DNA
cgctgattatgcatattctg

SEQ ID NO: 134 - DNA, 20 bp, synthetic construct
  source 1..20: mol_type = other DNA
ggtggcccgcatgccgggcc

SEQ ID NO: 135 - DNA, 20 bp, synthetic construct
  source 1..20: mol_type = other DNA
gacttgatcgccccattcgc

SEQ ID NO: 136 - DNA, 20 bp, synthetic construct
  source 1..20: mol_type = other DNA
ctctgaaagtgccccggctc

SEQ ID NO: 137 - DNA, 20 bp, synthetic construct
  source 1..20: mol_type = other DNA
ggatgacaggagccggatgg

SEQ ID NO: 138 - DNA, 20 bp, synthetic construct
  source 1..20: mol_type = other DNA
cctagtggtttcacagtggg

SEQ ID NO: 139 - DNA, 20 bp, synthetic construct
  source 1..20: mol_type = other DNA
agcctcgaggtaaatgtggg

SEQ ID NO: 140 - DNA, 20 bp, synthetic construct
  source 1..20: mol_type = other DNA
tcatctccggacacactcca

SEQ ID NO: 141 - DNA, 20 bp, synthetic construct
  source 1..20: mol_type = other DNA
agggttcccctagtagcccc

SEQ ID NO: 142 - DNA, 20 bp, synthetic construct
  source 1..20: mol_type = other DNA
ctagaccatgctgttagggt

SEQ ID NO: 143 - DNA, 20 bp, synthetic construct
  source 1..20: mol_type = other DNA
ccagcctctgactaacttag

SEQ ID NO: 144 - DNA, 20 bp, synthetic construct
  source 1..20: mol_type = other DNA
taaatcgcagccaggctcca

SEQ ID NO: 145 - DNA, 20 bp, synthetic construct
  source 1..20: mol_type = other DNA
ggctcccaccccgatggcag

SEQ ID NO: 146 - DNA, 20 bp, synthetic construct
  source 1..20: mol_type = other DNA
caccgcccacacaatgtgct

SEQ ID NO: 147 - DNA, 20 bp, synthetic construct
  source 1..20: mol_type = other DNA
gccgcctgatggctttctcc

SEQ ID NO: 148 - DNA, 20 bp, synthetic construct
  source 1..20: mol_type = other DNA
gggctattcttaggccccca

SEQ ID NO: 149 - DNA, 20 bp, synthetic construct
  source 1..20: mol_type = other DNA
gagccacctaaagcaggccc

SEQ ID NO: 150 - DNA, 20 bp, synthetic construct
  source 1..20: mol_type = other DNA
cactcatccgtggttctccc

SEQ ID NO: 151 - DNA, 20 bp, synthetic construct
  source 1..20: mol_type = other DNA
taaaggaccctatgactccc

SEQ ID NO: 152 - DNA, 20 bp, synthetic construct
  source 1..20: mol_type = other DNA
cctggcagggttagattgga

SEQ ID NO: 153 - DNA, 20 bp, synthetic construct
  source 1..20: mol_type = other DNA
gggtcccaagagaaattggt

SEQ ID NO: 154 - DNA, 20 bp, synthetic construct
  source 1..20: mol_type = other DNA
tggcgaatattttagacagg

SEQ ID NO: 155 - DNA, 20 bp, synthetic construct
  source 1..20: mol_type = other DNA
gaccaatctacattagccaa

SEQ ID NO: 156 - DNA, 20 bp, synthetic construct
  source 1..20: mol_type = other DNA
ttagcccaccctgagatgga

SEQ ID NO: 157 - DNA, 20 bp, synthetic construct
  source 1..20: mol_type = other DNA
acccataaaaatggccccgc

SEQ ID NO: 158 - DNA, 20 bp, synthetic construct
  source 1..20: mol_type = other DNA
ggctgttctccctagttata

SEQ ID NO: 159 - DNA, 20 bp, synthetic construct
  source 1..20: mol_type = other DNA
gcgagggctgctaaccaaag

SEQ ID NO: 160 - DNA, 20 bp, synthetic construct
  source 1..20: mol_type = other DNA
gtcctgacaaccccgtctca

SEQ ID NO: 161 - DNA, 20 bp, synthetic construct
  source 1..20: mol_type = other DNA
ggaccacttaggcacacaag

SEQ ID NO: 162 - DNA, 20 bp, synthetic construct
  source 1..20: mol_type = other DNA
tggaaggcttaggacccacg

SEQ ID NO: 163 - DNA, 20 bp, synthetic construct
  source 1..20: mol_type = other DNA
gtcgggaaggctcccactgc

SEQ ID NO: 164 - DNA, 20 bp, synthetic construct
  source 1..20: mol_type = other DNA
tgtgtatgtgtccgcctcgc

SEQ ID NO: 165 - DNA, 20 bp, synthetic construct
  source 1..20: mol_type = other DNA
gttagggatctaaagcagct

SEQ ID NO: 166 - DNA, 20 bp, synthetic construct
  source 1..20: mol_type = other DNA
aactcccagcatcccgatgg

SEQ ID NO: 167 - DNA, 20 bp, synthetic construct
  source 1..20: mol_type = other DNA
accaggagttgtggattccc

SEQ ID NO: 168 - DNA, 20 bp, synthetic construct
  source 1..20: mol_type = other DNA
gccagtgcctcgccccaaga

SEQ ID NO: 169 - DNA, 20 bp, synthetic construct
  source 1..20: mol_type = other DNA
gcacagcactgccggagtgc

SEQ ID NO: 170 - DNA, 20 bp, synthetic construct
  source 1..20: mol_type = other DNA
cgagcacacaacactacgca

SEQ ID NO: 171 - DNA, 20 bp, synthetic construct
  source 1..20: mol_type = other DNA
tccatagttgggagataagg

SEQ ID NO: 172 - DNA, 20 bp, synthetic construct
  source 1..20: mol_type = other DNA
gcgctgaccgtaagctgagg

SEQ ID NO: 173 - DNA, 20 bp, synthetic construct
  source 1..20: mol_type = other DNA
agccaccatcgcgatcggcc

SEQ ID NO: 174 - DNA, 20 bp, synthetic construct
  source 1..20: mol_type = other DNA
cttggccacaccctttatgc

SEQ ID NO: 175 - DNA, 20 bp, synthetic construct
  source 1..20: mol_type = other DNA
cccctgcagtgaaacctcgc

SEQ ID NO: 176 - DNA, 20 bp, synthetic construct
  source 1..20: mol_type = other DNA
gcttcctattgcaagaccgc

SEQ ID NO: 177 - DNA, 20 bp, synthetic construct
  source 1..20: mol_type = other DNA
gagtagctggtgcccgacgg

SEQ ID NO: 178 - DNA, 20 bp, synthetic construct
  source 1..20: mol_type = other DNA
ggaccccggaggtgtctagg

SEQ ID NO: 179 - DNA, 20 bp, synthetic construct
  source 1..20: mol_type = other DNA
ggacatggacaaagtgcggt

SEQ ID NO: 180 - DNA, 20 bp, synthetic construct
  source 1..20: mol_type = other DNA
acctcccaggccacttcgaa

SEQ ID NO: 181 - DNA, 20 bp, synthetic construct
  source 1..20: mol_type = other DNA
caccaggaagtagttgtcgc

SEQ ID NO: 182 - DNA, 20 bp, synthetic construct
  source 1..20: mol_type = other DNA
ctccgtgtacggccccacca

SEQ ID NO: 183 - DNA, 20 bp, synthetic construct
  source 1..20: mol_type = other DNA
cctcacgccctgctccgtgt

SEQ ID NO: 184 - DNA, 20 bp, synthetic construct
  source 1..20: mol_type = other DNA
cagagggcctccctcgatca

SEQ ID NO: 185 - DNA, 20 bp, synthetic construct
  source 1..20: mol_type = other DNA
cgtaccacggcactccgatg

SEQ ID NO: 186 - DNA, 20 bp, synthetic construct
  source 1..20: mol_type = other DNA
gctacaggcagtcgccgggc

SEQ ID NO: 187 - DNA, 20 bp, synthetic construct
  source 1..20: mol_type = other DNA
gtccacggcaccggcacaca

SEQ ID NO: 188 - DNA, 20 bp, synthetic construct
  source 1..20: mol_type = other DNA
tgagcgcagtgggctgccgc

SEQ ID NO: 189 - DNA, 20 bp, synthetic construct
  source 1..20: mol_type = other DNA
gtgctgtgcctcgatggcgg

SEQ ID NO: 190 - DNA, 20 bp, synthetic construct
  source 1..20: mol_type = other DNA
atggccccgcacaaactcct

SEQ ID NO: 191 - DNA, 20 bp, synthetic construct
  source 1..20: mol_type = other DNA
gcggccggcgataaagaagt

SEQ ID NO: 192 - DNA, 20 bp, synthetic construct
  source 1..20: mol_type = other DNA
agaactcatagcggccggcg

SEQ ID NO: 193 - DNA, 20 bp, synthetic construct
  source 1..20: mol_type = other DNA
gttgagccgagccaatgcct

SEQ ID NO: 194 - DNA, 20 bp, synthetic construct
  source 1..20: mol_type = other DNA
gttggtccgcgctggcatga

SEQ ID NO: 195 - DNA, 20 bp, synthetic construct
  source 1..20: mol_type = other DNA
ccagcatattgtgggtgcac

SEQ ID NO: 196 - DNA, 20 bp, synthetic construct
  source 1..20: mol_type = other DNA
ccctgtcggcactgctattg

SEQ ID NO: 197 - DNA, 20 bp, synthetic construct
  source 1..20: mol_type = other DNA
gtagccccaaggctcatagt

SEQ ID NO: 198 - DNA, 20 bp, synthetic construct
  source 1..20: mol_type = other DNA
ccatgaagcagccgaagccg

SEQ ID NO: 199 - DNA, 20 bp, synthetic construct
  source 1..20: mol_type = other DNA
ggctgcggaaccgccggtca

SEQ ID NO: 200 - DNA, 20 bp, synthetic construct
  source 1..20: mol_type = other DNA
gctgcgagcaggaatcatcc

SEQ ID NO: 201 - DNA, 20 bp, synthetic construct
  source 1..20: mol_type = other DNA
ccgctggatgatacgctgcc

SEQ ID NO: 202 - DNA, 20 bp, synthetic construct
  source 1..20: mol_type = other DNA
ggcctaggtatttccagtcc

SEQ ID NO: 203 - DNA, 20 bp, synthetic construct
  source 1..20: mol_type = other DNA
gccgtgggtagcggtacccc

SEQ ID NO: 204 - DNA, 20 bp, synthetic construct
  source 1..20: mol_type = other DNA
gacagcgagggcgacggtgg

SEQ ID NO: 205 - DNA, 20 bp, synthetic construct
  source 1..20: mol_type = other DNA
cgtcttcctccagcggcccg

SEQ ID NO: 206 - DNA, 20 bp, synthetic construct
  source 1..20: mol_type = other DNA
ccactctggtgcacggatgt

SEQ ID NO: 207 - DNA, 20 bp, synthetic construct
  source 1..20: mol_type = other DNA
gagttgcgcttgctgccgct

SEQ ID NO: 208 - DNA, 20 bp, synthetic construct
  source 1..20: mol_type = other DNA
gttacgctcctcgcccaggg

SEQ ID NO: 209 - DNA, 20 bp, synthetic construct
  source 1..20: mol_type = other DNA
cccagtgcagatctggagcg

SEQ ID NO: 210 - DNA, 20 bp, synthetic construct
  source 1..20: mol_type = other DNA
caccgcagagtaatggcaga

SEQ ID NO: 211 - DNA, 20 bp, synthetic construct
  source 1..20: mol_type = other DNA
cttggtggcccgcatgccgg

SEQ ID NO: 212 - DNA, 20 bp, synthetic construct
  source 1..20: mol_type = other DNA
gctctggacttgatcgcccc

SEQ ID NO: 213 - DNA, 20 bp, synthetic construct
  source 1..20: mol_type = other DNA
aaactctgaaagtgccccgg

SEQ ID NO: 214 - DNA, 20 bp, synthetic construct
  source 1..20: mol_type = other DNA
gtggttctaccacctcttgc

SEQ ID NO: 215 - DNA, 20 bp, synthetic construct
  source 1..20: mol_type = other DNA
aggacctagaacctagtggt

SEQ ID NO: 216 - DNA, 20 bp, synthetic construct
  source 1..20: mol_type = other DNA
ggatggaagagcctcgaggt

SEQ ID NO: 217 - DNA, 20 bp, synthetic construct
  source 1..20: mol_type = other DNA
tcatctcatctccggacaca

SEQ ID NO: 218 - DNA, 20 bp, synthetic construct
  source 1..20: mol_type = other DNA
gtcaaacgaaccatccctct

SEQ ID NO: 219 - DNA, 20 bp, synthetic construct
  source 1..20: mol_type = other DNA
accgccgctcaggcctccta

SEQ ID NO: 220 - DNA, 20 bp, synthetic construct
  source 1..20: mol_type = other DNA
gtgtgagattggcttgttcc

SEQ ID NO: 221 - DNA, 20 bp, synthetic construct
  source 1..20: mol_type = other DNA
acccggactcaggttcccga

SEQ ID NO: 222 - DNA, 20 bp, synthetic construct
  source 1..20: mol_type = other DNA
gtgtccaagcctgcctcgct

SEQ ID NO: 223 - DNA, 20 bp, synthetic construct
  source 1..20: mol_type = other DNA
tccaagcttggctgttagta

SEQ ID NO: 224 - DNA, 20 bp, synthetic construct
  source 1..20: mol_type = other DNA
tgccgcctgatggctttctc

SEQ ID NO: 225 - DNA, 20 bp, synthetic construct
  source 1..20: mol_type = other DNA
cgctcctcgccgacctggct

SEQ ID NO: 226 - DNA, 20 bp, synthetic construct
  source 1..20: mol_type = other DNA
aattccttccacgggatgct

SEQ ID NO: 227 - DNA, 20 bp, synthetic construct
  source 1..20: mol_type = other DNA
atcttcactcatccgtggtt

SEQ ID NO: 228 - DNA, 20 bp, synthetic construct
  source 1..20: mol_type = other DNA
atcgagagtagagcctgggc

SEQ ID NO: 229 - DNA, 20 bp, synthetic construct
  source 1..20: mol_type = other DNA
agagtgggcagcggcccact

SEQ ID NO: 230 - DNA, 20 bp, synthetic construct
  source 1..20: mol_type = other DNA
gtccggttagaaggattggg

SEQ ID NO: 231 - DNA, 20 bp, synthetic construct
  source 1..20: mol_type = other DNA
ggccacccaaatcatgcaat

SEQ ID NO: 232 - DNA, 20 bp, synthetic construct
  source 1..20: mol_type = other DNA
gcccagttctgacctaacct

SEQ ID NO: 233 - DNA, 20 bp, synthetic construct
  source 1..20: mol_type = other DNA
gggatctgatccacactggt

SEQ ID NO: 234 - DNA, 20 bp, synthetic construct
  source 1..20: mol_type = other DNA
cgccctcctctcttaagacc

SEQ ID NO: 235 - DNA, 20 bp, synthetic construct
  source 1..20: mol_type = other DNA
acggccccccaccatactca

SEQ ID NO: 236 - DNA, 20 bp, synthetic construct
  source 1..20: mol_type = other DNA
cggagcgagggctgctaacc

SEQ ID NO: 237 - DNA, 20 bp, synthetic construct
  source 1..20: mol_type = other DNA
cgtctctgcccaataacact

SEQ ID NO: 238 - DNA, 20 bp, synthetic construct
  source 1..20: mol_type = other DNA
ggacttgtacttgtcctgca

SEQ ID NO: 239 - DNA, 20 bp, synthetic construct
  source 1..20: mol_type = other DNA
tgccgcgcccagctaccctt

SEQ ID NO: 240 - DNA, 20 bp, synthetic construct
  source 1..20: mol_type = other DNA
ggctgccaggaactgctatc

SEQ ID NO: 241 - DNA, 20 bp, synthetic construct
  source 1..20: mol_type = other DNA
ccgtgtgcagcaaggcccaa

SEQ ID NO: 242 - DNA, 20 bp, synthetic construct
  source 1..20: mol_type = other DNA
gtagttttttgggcccctag

SEQ ID NO: 243 - DNA, 20 bp, synthetic construct
  source 1..20: mol_type = other DNA
gggtgtatagttcttagcaa

SEQ ID NO: 244 - DNA, 20 bp, synthetic construct
  source 1..20: mol_type = other DNA
atgagccatgcggaccctgg

SEQ ID NO: 245 - DNA, 20 bp, synthetic construct
  source 1..20: mol_type = other DNA
cgcgctgtagcagaacaggt

SEQ ID NO: 246 - DNA, 20 bp, synthetic construct
  source 1..20: mol_type = other DNA
gcacagtttgcaggacttgt

SEQ ID NO: 247 - DNA, 20 bp, synthetic construct
  source 1..20: mol_type = other DNA
cctgtgtacagagcatctag

SEQ ID NO: 248 - DNA, 20 bp, synthetic construct
  source 1..20: mol_type = other DNA
aagtccatagttgggagata

SEQ ID NO: 249 - DNA, 20 bp, synthetic construct
  source 1..20: mol_type = other DNA
cggcccgagagcccccccat

SEQ ID NO: 250 - DNA, 20 bp, synthetic construct
  source 1..20: mol_type = other DNA
tgcgatccttcctgttaggc

SEQ ID NO: 251 - DNA, 20 bp, synthetic construct
  source 1..20: mol_type = other DNA
gcgcgcagacatatagtact

SEQ ID NO: 252 - DNA, 20 bp, synthetic construct
  source 1..20: mol_type = other DNA
cgtcactgagcccactggcg

SEQ ID NO: 253 - DNA, 20 bp, synthetic construct
  source 1..20: mol_type = other DNA
acgctcggcttcctattgca

SEQ ID NO: 254 - DNA, 20 bp, synthetic construct
  source 1..20: mol_type = other DNA
atgcaccaggtagggtgcgg

SEQ ID NO: 255 - DNA, 20 bp, synthetic construct
  source 1..20: mol_type = other DNA
ggtagggaccccggaggtgt

SEQ ID NO: 256 - DNA, 20 bp, synthetic construct
  source 1..20: mol_type = other DNA
cgaattcatcctcccagtcc

SEQ ID NO: 257 - DNA, 20 bp, synthetic construct
  source 1..20: mol_type = other DNA
gcaccgtgtagatgccaccc

SEQ ID NO: 258 - DNA, 20 bp, synthetic construct
  source 1..20: mol_type = other DNA
cccaccaggaagtagttgtc

SEQ ID NO: 259 - DNA, 20 bp, synthetic construct
  source 1..20: mol_type = other DNA
gctccgtgtacggccccacc

SEQ ID NO: 260 - DNA, 20 bp, synthetic construct
  source 1..20: mol_type = other DNA
ggtcctcacgccctgctccg

SEQ ID NO: 261 - DNA, 20 bp, synthetic construct
  source 1..20: mol_type = other DNA
caccagagggcctccctcga

SEQ ID NO: 262 - DNA, 20 bp, synthetic construct
  source 1..20: mol_type = other DNA
gccaaccactcatggaagtg

SEQ ID NO: 263 - DNA, 20 bp, synthetic construct
  source 1..20: mol_type = other DNA
gttgctacaggcagtcgccg

SEQ ID NO: 264 - DNA, 20 bp, synthetic construct
  source 1..20: mol_type = other DNA
ttgtagaagtccacggcacc

SEQ ID NO: 265 - DNA, 20 bp, synthetic construct
  source 1..20: mol_type = other DNA
ggcggtgatctgggacacag

SEQ ID NO: 266 - DNA, 20 bp, synthetic construct
  source 1..20: mol_type = other DNA
aagtgctgtgcctcgatggc

SEQ ID NO: 267 - DNA, 20 bp, synthetic construct
  source 1..20: mol_type = other DNA
cccataaaaatggccccgca

SEQ ID NO: 268 - DNA, 20 bp, synthetic construct
  source 1..20: mol_type = other DNA
agcggccggcgataaagaag

SEQ ID NO: 269 - DNA, 20 bp, synthetic construct
  source 1..20: mol_type = other DNA
gagaactcatagcggccggc

SEQ ID NO: 270 - DNA, 20 bp, synthetic construct
  source 1..20: mol_type = other DNA
gcagatagttgagccgagcc

SEQ ID NO: 271 - DNA, 20 bp, synthetic construct
  source 1..20: mol_type = other DNA
aattgttggtccgcgctggc

SEQ ID NO: 272 - DNA, 20 bp, synthetic construct
  source 1..20: mol_type = other DNA
gtcatccagcatattgtggg

SEQ ID NO: 273 - DNA, 20 bp, synthetic construct
  source 1..20: mol_type = other DNA
tcaccctgtcggcactgcta

SEQ ID NO: 274 - DNA, 20 bp, synthetic construct
  source 1..20: mol_type = other DNA
gtgtgtagccccaaggctca

SEQ ID NO: 275 - DNA, 20 bp, synthetic construct
  source 1..20: mol_type = other DNA
ctgcgatgtgttcctccatg

SEQ ID NO: 276 - DNA, 20 bp, synthetic construct
  source 1..20: mol_type = other DNA
ccaggctgcggaaccgccgg

SEQ ID NO: 277 - DNA, 20 bp, synthetic construct
  source 1..20: mol_type = other DNA
gtgagctgcgagcaggaatc

SEQ ID NO: 278 - DNA, 20 bp, synthetic construct
  source 1..20: mol_type = other DNA
ggttccgctggatgatacgc

SEQ ID NO: 279 - DNA, 20 bp, synthetic construct
  source 1..20: mol_type = other DNA
gtggcgcgcagacatatagt

SEQ ID NO: 280 - DNA, 20 bp, synthetic construct
  source 1..20: mol_type = other DNA
ggctggccgtgggtagcggt

SEQ ID NO: 281 - DNA, 20 bp, synthetic construct
  source 1..20: mol_type = other DNA
cgtgacagcgagggcgacgg

SEQ ID NO: 282 - DNA, 20 bp, synthetic construct
  source 1..20: mol_type = other DNA
cgccgtcttcctccagcggc

SEQ ID NO: 283 - DNA, 20 bp, synthetic construct
  source 1..20: mol_type = other DNA
gcggccactctggtgcacgg

SEQ ID NO: 284 - DNA, 20 bp, synthetic construct
  source 1..20: mol_type = other DNA
cacagagttgcgcttgctgc

SEQ ID NO: 285 - DNA, 20 bp, synthetic construct
  source 1..20: mol_type = other DNA
cttagttacgctcctcgccc

SEQ ID NO: 286 - DNA, 20 bp, synthetic construct
  source 1..20: mol_type = other DNA
gtgtttggcggactgggtgg

SEQ ID NO: 287 - DNA, 20 bp, synthetic construct
  source 1..20: mol_type = other DNA
tctggcaccaccgcagagta

SEQ ID NO: 288 - DNA, 20 bp, synthetic construct
  source 1..20: mol_type = other DNA
ccagaacttggtggcccgca

SEQ ID NO: 289 - DNA, 20 bp, synthetic construct
  source 1..20: mol_type = other DNA
ggctctggacttgatcgccc

SEQ ID NO: 290 - DNA, 20 bp, synthetic construct
  source 1..20: mol_type = other DNA
aatggaggaccatctgctct

SEQ ID NO: 291 - DNA, 20 bp, synthetic construct
  source 1..20: mol_type = other DNA
gcagccaagtggttctacca

SEQ ID NO: 292 - DNA, 20 bp, synthetic construct
  source 1..20: mol_type = other DNA
gccaggacctagaacctagt

SEQ ID NO: 293 - DNA, 20 bp, synthetic construct
  source 1..20: mol_type = other DNA
aaccaagcggtgcagacaca

SEQ ID NO: 294 - DNA, 20 bp, synthetic construct
  source 1..20: mol_type = other DNA
acccttgttagccacctccc

SEQ ID NO: 295 - DNA, 20 bp, synthetic construct
  source 1..20: mol_type = other DNA
gcgccctcttccctaggacc

SEQ ID NO: 296 - DNA, 20 bp, synthetic construct
  source 1..20: mol_type = other DNA
tacagtctccagcccgtccc

SEQ ID NO: 297 - DNA, 20 bp, synthetic construct
  source 1..20: mol_type = other DNA
ggccctggcgatacccggct

SEQ ID NO: 298 - DNA, 20 bp, synthetic construct
  source 1..20: mol_type = other DNA
ggtgccgggaccccttggtc

SEQ ID NO: 299 - DNA, 20 bp, synthetic construct
  source 1..20: mol_type = other DNA
cgcccatgtctgggatccac

SEQ ID NO: 300 - DNA, 20 bp, synthetic construct
  source 1..20: mol_type = other DNA
ccccagtctattactcttgc

SEQ ID NO: 301 - DNA, 20 bp, synthetic construct
  source 1..20: mol_type = other DNA
gtgccgcctgatggctttct

SEQ ID NO: 302 - DNA, 20 bp, synthetic construct
  source 1..20: mol_type = other DNA
tctagccactgccgtgtttc

SEQ ID NO: 303 - DNA, 20 bp, synthetic construct
  source 1..20: mol_type = other DNA
tgctaattccttccacggga

SEQ ID NO: 304 - DNA, 20 bp, synthetic construct
  source 1..20: mol_type = other DNA
ccgaaatacacctgggatgg

SEQ ID NO: 305 - DNA, 20 bp, synthetic construct
  source 1..20: mol_type = other DNA
ctcgggcaagcccgccagcc

SEQ ID NO: 306 - DNA, 20 bp, synthetic construct
  source 1..20: mol_type = other DNA
ccagtagggacaaggactcg

SEQ ID NO: 307 - DNA, 20 bp, synthetic construct
  source 1..20: mol_type = other DNA
ggacagcagtccggttagaa

SEQ ID NO: 308 - DNA, 20 bp, synthetic construct
  source 1..20: mol_type = other DNA
cgtaggctaacataaagtgt

SEQ ID NO: 309 - DNA, 20 bp, synthetic construct
  source 1..20: mol_type = other DNA
ggagttgtagttctcacctt

SEQ ID NO: 310 - DNA, 20 bp, synthetic construct
  source 1..20: mol_type = other DNA
gcacaagtataagtctcctc

SEQ ID NO: 311 - DNA, 20 bp, synthetic construct
  source 1..20: mol_type = other DNA
ccgaatacccaggtgccccc

SEQ ID NO: 312 - DNA, 20 bp, synthetic construct
  source 1..20: mol_type = other DNA
gggatcctgccatacccatt

SEQ ID NO: 313 - DNA, 20 bp, synthetic construct
  source 1..20: mol_type = other DNA
gccggagcgagggctgctaa

SEQ ID NO: 314 - DNA, 20 bp, synthetic construct
  source 1..20: mol_type = other DNA
cgagtttgctgttcctcaga

SEQ ID NO: 315 - DNA, 20 bp, synthetic construct
  source 1..20: mol_type = other DNA
aggacttgtacttgtcctgc

SEQ ID NO: 316 - DNA, 20 bp, synthetic construct
  source 1..20: mol_type = other DNA
ggctggtaattggccacctc

SEQ ID NO: 317 - DNA, 20 bp, synthetic construct
  source 1..20: mol_type = other DNA
ggacctcagaatagatccct

SEQ ID NO: 318 - DNA, 20 bp, synthetic construct
  source 1..20: mol_type = other DNA
gtagaggtggagccgtgtgc

SEQ ID NO: 319 - DNA, 20 bp, synthetic construct
  source 1..20: mol_type = other DNA
gttgtagttttttgggcccc

SEQ ID NO: 320 - DNA, 20 bp, synthetic construct
  source 1..20: mol_type = other DNA
gctagtgtgataggaagtcc

SEQ ID NO: 321 - DNA, 20 bp, synthetic construct
  source 1..20: mol_type = other DNA
gtgtttggcaggaccaatgt

SEQ ID NO: 322 - DNA, 20 bp, synthetic construct
  source 1..20: mol_type = other DNA
agcacgcgctgtagcagaac

SEQ ID NO: 323 - DNA, 20 bp, synthetic construct
  source 1..20: mol_type = other DNA
accgcgactcctaattatca

SEQ ID NO: 324 - DNA, 20 bp, synthetic construct
  source 1..20: mol_type = other DNA
gtacggacttagtctatttt

SEQ ID NO: 325 - DNA, 20 bp, synthetic construct
  source 1..20: mol_type = other DNA
gcgggaaagtccatagttgg

SEQ ID NO: 326 - DNA, 20 bp, synthetic construct
  source 1..20: mol_type = other DNA
cccggcctaggtatttccag

SEQ ID NO: 327 - DNA, 20 bp, synthetic construct
  source 1..20: mol_type = other DNA
gttactctaggatggagtgc

SEQ ID NO: 328 - DNA, 20 bp, synthetic construct
  source 1..20: mol_type = other DNA
ggtccactcaccgcatccgc

SEQ ID NO: 329 - DNA, 20 bp, synthetic construct
  source 1..20: mol_type = other DNA
cgttgggacctaggcagaag

SEQ ID NO: 330 - DNA, 20 bp, synthetic construct
  source 1..20: mol_type = other DNA
acgggaagcttgcaagacgc

SEQ ID NO: 331 - DNA, 20 bp, synthetic construct
  source 1..20: mol_type = other DNA
tagggaatgcaccaggtagg

SEQ ID NO: 332 - DNA, 20 bp, synthetic construct
  source 1..20: mol_type = other DNA
gatctccaggtagggacccc

SEQ ID NO: 333 - DNA, 20 bp, synthetic construct
  source 1..20: mol_type = other DNA
ctccaggtcgaattcatcct

SEQ ID NO: 334 - DNA, 20 bp, synthetic construct
  source 1..20: mol_type = other DNA
ctgcagcaccgtgtagatgc

SEQ ID NO: 335 - DNA, 20 bp, synthetic construct
  source 1..20: mol_type = other DNA
cggccccaccaggaagtagt

SEQ ID NO: 336 - DNA, 20 bp, synthetic construct
  source 1..20: mol_type = other DNA
cctgctccgtgtacggcccc

SEQ ID NO: 337 - DNA, 20 bp, synthetic construct
  source 1..20: mol_type = other DNA
gttccacctgggtcctcacg

SEQ ID NO: 338 - DNA, 20 bp, synthetic construct
  source 1..20: mol_type = other DNA
ccgatgttgcaggtatccca

SEQ ID NO: 339 - DNA, 20 bp, synthetic construct
  source 1..20: mol_type = other DNA
cgcctgccaaccactcatgg

SEQ ID NO: 340 - DNA, 20 bp, synthetic construct
  source 1..20: mol_type = other DNA
atggttgctacaggcagtcg

SEQ ID NO: 341 - DNA, 20 bp, synthetic construct
  source 1..20: mol_type = other DNA
gttgttgtagaagtccacgg

SEQ ID NO: 342 - DNA, 20 bp, synthetic construct
  source 1..20: mol_type = other DNA
cgatggcggtgatctgggac

SEQ ID NO: 343 - DNA, 20 bp, synthetic construct
  source 1..20: mol_type = other DNA
tgagcaagtgctgtgcctcg

SEQ ID NO: 344 - DNA, 20 bp, synthetic construct
  source 1..20: mol_type = other DNA
ggtcttgtccaagttgaagt

SEQ ID NO: 345 - DNA, 20 bp, synthetic construct
  source 1..20: mol_type = other DNA
catagcggccggcgataaag

SEQ ID NO: 346 - DNA, 20 bp, synthetic construct
  source 1..20: mol_type = other DNA
tggagaactcatagcggccg

SEQ ID NO: 347 - DNA, 20 bp, synthetic construct
  source 1..20: mol_type = other DNA
gtctgctcgctgccgttcac

SEQ ID NO: 348 - DNA, 20 bp, synthetic construct
  source 1..20: mol_type = other DNA
gcgcacagcttggcctttga

SEQ ID NO: 349 - DNA, 20 bp, synthetic construct
  source 1..20: mol_type = other DNA
tcggcggatggtggtcagga

SEQ ID NO: 350 - DNA, 20 bp, synthetic construct
  source 1..20: mol_type = other DNA
caccttcaccctgtcggcac

SEQ ID NO: 351 - DNA, 20 bp, synthetic construct
  source 1..20: mol_type = other DNA
ccggtgtgtagccccaaggc

SEQ ID NO: 352 - DNA, 20 bp, synthetic construct
  source 1..20: mol_type = other DNA
gtctgcgatgtgttcctcca

SEQ ID NO: 353 - DNA, 20 bp, synthetic construct
  source 1..20: mol_type = other DNA
atccaggctgcggaaccgcc

SEQ ID NO: 354 - DNA, 20 bp, synthetic construct
  source 1..20: mol_type = other DNA
cgccggctctgctgacagaa

SEQ ID NO: 355 - DNA, 20 bp, synthetic construct
  source 1..20: mol_type = other DNA
ccgtgcggttccgctggatg

SEQ ID NO: 356 - DNA, 20 bp, synthetic construct
  source 1..20: mol_type = other DNA
gcgccatgtggcgcgcagac

SEQ ID NO: 357 - DNA, 20 bp, synthetic construct
  source 1..20: mol_type = other DNA
ccgaggctggccgtgggtag

SEQ ID NO: 358 - DNA, 20 bp, synthetic construct
  source 1..20: mol_type = other DNA
tggtgcgggctggagtgtcg

SEQ ID NO: 359 - DNA, 20 bp, synthetic construct
  source 1..20: mol_type = other DNA
ccggtccttggcggcctcct

SEQ ID NO: 360 - DNA, 20 bp, synthetic construct
  source 1..20: mol_type = other DNA
cggcgcggccactctggtgc

SEQ ID NO: 361 - DNA, 20 bp, synthetic construct
  source 1..20: mol_type = other DNA
gtccacagagttgcgcttgc

SEQ ID NO: 362 - DNA, 20 bp, synthetic construct
  source 1..20: mol_type = other DNA
ggacttagttacgctcctcg

SEQ ID NO: 363 - DNA, 20 bp, synthetic construct
  source 1..20: mol_type = other DNA
ggagtgtttggcggactggg

SEQ ID NO: 364 - DNA, 20 bp, synthetic construct
  source 1..20: mol_type = other DNA
acctctggcaccaccgcaga

SEQ ID NO: 365 - DNA, 20 bp, synthetic construct
  source 1..20: mol_type = other DNA
cgtggtttccagaacttggt

SEQ ID NO: 366 - DNA, 20 bp, synthetic construct
  source 1..20: mol_type = other DNA
ccccggctctggacttgatc

SEQ ID NO: 367 - DNA, 20 bp, synthetic construct
  source 1..20: mol_type = other DNA
gagggctagaacatccctcc

SEQ ID NO: 368 - DNA, 20 bp, synthetic construct
  source 1..20: mol_type = other DNA
cggattccctggagggagat

SEQ ID NO: 369 - DNA, 20 bp, synthetic construct
  source 1..20: mol_type = other DNA
gatctagaagccaggaccta

SEQ ID NO: 370 - DNA, 20 bp, synthetic construct
  source 1..20: mol_type = other DNA
gcaaaccaagcggtgcagac

SEQ ID NO: 371 - DNA, 20 bp, synthetic construct
  source 1..20: mol_type = other DNA
gctcacccttgttagccacc

SEQ ID NO: 372 - DNA, 20 bp, synthetic construct
  source 1..20: mol_type = other DNA
acccaggtatctagtctctc

SEQ ID NO: 373 - DNA, 20 bp, synthetic construct
  source 1..20: mol_type = other DNA
acgcatgtgtcccaggccat

SEQ ID NO: 374 - DNA, 20 bp, synthetic construct
  source 1..20: mol_type = other DNA
gactagggacaccagcatgc

SEQ ID NO: 375 - DNA, 20 bp, synthetic construct
  source 1..20: mol_type = other DNA
gggagcccatagtttggagt

SEQ ID NO: 376 - DNA, 20 bp, synthetic construct
  source 1..20: mol_type = other DNA
ttggcctcttggatctccgt

SEQ ID NO: 377 - DNA, 20 bp, synthetic construct
  source 1..20: mol_type = other DNA
ccccgatattccatgcttct

SEQ ID NO: 378 - DNA, 20 bp, synthetic construct
  source 1..20: mol_type = other DNA
cgtgccgcctgatggctttc

SEQ ID NO: 379 - DNA, 20 bp, synthetic construct
  source 1..20: mol_type = other DNA
accgccctcggccacgccac

SEQ ID NO: 380 - DNA, 20 bp, synthetic construct
  source 1..20: mol_type = other DNA
ttccgtgccccctgcttact

SEQ ID NO: 381 - DNA, 20 bp, synthetic construct
  source 1..20: mol_type = other DNA
cgcccgaaatacacctggga

SEQ ID NO: 382 - DNA, 20 bp, synthetic construct
  source 1..20: mol_type = other DNA
gccataggagcagccagttc

SEQ ID NO: 383 - DNA, 20 bp, synthetic construct
  source 1..20: mol_type = other DNA
ggccactgtctccacgagtg

SEQ ID NO: 384 - DNA, 20 bp, synthetic construct
  source 1..20: mol_type = other DNA
ggcatagacagctgcctacc

SEQ ID NO: 385 - DNA, 20 bp, synthetic construct
  source 1..20: mol_type = other DNA
cttaggacttaggatggtcc

SEQ ID NO: 386 - DNA, 20 bp, synthetic construct
  source 1..20: mol_type = other DNA
actacaacccccatcagcgc

SEQ ID NO: 387 - DNA, 20 bp, synthetic construct
  source 1..20: mol_type = other DNA
gccttcttgcctaatattac

SEQ ID NO: 388 - DNA, 20 bp, synthetic construct
  source 1..20: mol_type = other DNA
taatacagaggcatcacggg

SEQ ID NO: 389 - DNA, 20 bp, synthetic construct
  source 1..20: mol_type = other DNA
gctcgctgccgttcacctgc

SEQ ID NO: 390 - DNA, 20 bp, synthetic construct
  source 1..20: mol_type = other DNA
ggccggagcgagggctgcta

SEQ ID NO: 391 - DNA, 20 bp, synthetic construct
  source 1..20: mol_type = other DNA
ccccatgggactccccaccg

SEQ ID NO: 392 - DNA, 20 bp, synthetic construct
  source 1..20: mol_type = other DNA
attaggacttgtacttgtcc

SEQ ID NO: 393 - DNA, 20 bp, synthetic construct
  source 1..20: mol_type = other DNA
gccatttactgttaggcttc

SEQ ID NO: 394 - DNA, 20 bp, synthetic construct
  source 1..20: mol_type = other DNA
cccaccctaagtgcctcgcc

SEQ ID NO: 395 - DNA, 20 bp, synthetic construct
  source 1..20: mol_type = other DNA
ttgctcacctcctgactgcg

SEQ ID NO: 396 - DNA, 20 bp, synthetic construct
  source 1..20: mol_type = other DNA
ggagttgtagttttttgggc

SEQ ID NO: 397 - DNA, 20 bp, synthetic construct
  source 1..20: mol_type = other DNA
gactgtgccaatatggcagc

SEQ ID NO: 398 - DNA, 20 bp, synthetic construct
  source 1..20: mol_type = other DNA
gcccaagtgccttatttagc

SEQ ID NO: 399 - DNA, 20 bp, synthetic construct
  source 1..20: mol_type = other DNA
catccagttcactagtcctc

SEQ ID NO: 400 - DNA, 20 bp, synthetic construct
  source 1..20: mol_type = other DNA
ggctgaccgcgactcctaat

SEQ ID NO: 401 - DNA, 20 bp, synthetic construct
  source 1..20: mol_type = other DNA
tgccagtatcttgtacggac

SEQ ID NO: 402 - DNA, 20 bp, synthetic construct
  source 1..20: mol_type = other DNA
gtcgctgagcccccacaacc

SEQ ID NO: 403 - DNA, 20 bp, synthetic construct
  source 1..20: mol_type = other DNA
gggtcctacccggcctaggt

SEQ ID NO: 404 - DNA, 20 bp, synthetic construct
  source 1..20: mol_type = other DNA
tctttggccacacccttatg

SEQ ID NO: 405 - DNA, 20 bp, synthetic construct
  source 1..20: mol_type = other DNA
agcggtacccctgggcctgc

SEQ ID NO: 406 - DNA, 20 bp, synthetic construct
  source 1..20: mol_type = other DNA
cgcacccctgccccgaagcg

SEQ ID NO: 407 - DNA, 20 bp, synthetic construct
  source 1..20: mol_type = other DNA
cccgacgggaagcttgcaag

SEQ ID NO: 408 - DNA, 20 bp, synthetic construct
  source 1..20: mol_type = other DNA
gtctagggaatgcaccaggt

SEQ ID NO: 409 - DNA, 20 bp, synthetic construct
  source 1..20: mol_type = other DNA
taaaggcatggctggcgcag

SEQ ID NO: 410 - DNA, 20 bp, synthetic construct
  source 1..20: mol_type = other DNA
cgttctccaggtcgaattca

SEQ ID NO: 411 - DNA, 20 bp, synthetic construct
  source 1..20: mol_type = other DNA
cgtctgcagcaccgtgtaga

SEQ ID NO: 412 - DNA, 20 bp, synthetic construct
  source 1..20: mol_type = other DNA
gtacggccccaccaggaagt

SEQ ID NO: 413 - DNA, 20 bp, synthetic construct
  source 1..20: mol_type = other DNA
ccctgctccgtgtacggccc

SEQ ID NO: 414 - DNA, 20 bp, synthetic construct
  source 1..20: mol_type = other DNA
gttcatggaatccagtgtcc

SEQ ID NO: 415 - DNA, 20 bp, synthetic construct
  source 1..20: mol_type = other DNA
tccgatgttgcaggtatccc

SEQ ID NO: 416 - DNA, 20 bp, synthetic construct
  source 1..20: mol_type = other DNA
ccgggcacgacacaggcaga

SEQ ID NO: 417 - DNA, 20 bp, synthetic construct
  source 1..20: mol_type = other DNA
cgtggcatgggtggtgaaga

SEQ ID NO: 418 - DNA, 20 bp, synthetic construct
  source 1..20: mol_type = other DNA
ccgccctttccatgcagtat

SEQ ID NO: 419 - DNA, 20 bp, synthetic construct
  source 1..20: mol_type = other DNA
cctcgatggcggtgatctgg

SEQ ID NO: 420 - DNA, 20 bp, synthetic construct
  source 1..20: mol_type = other DNA
cgagccttgctctgagcatg

SEQ ID NO: 421 - DNA, 20 bp, synthetic construct
  source 1..20: mol_type = other DNA
gtataaggtcttgtccaagt

SEQ ID NO: 422 - DNA, 20 bp, synthetic construct
  source 1..20: mol_type = other DNA
tcatagcggccggcgataaa

SEQ ID NO: 423 - DNA, 20 bp, synthetic construct
  source 1..20: mol_type = other DNA
tgttggagaactcatagcgg

SEQ ID NO: 424 - DNA, 20 bp, synthetic construct
  source 1..20: mol_type = other DNA
ccactgtctgctcgctgccg

SEQ ID NO: 425 - DNA, 20 bp, synthetic construct
  source 1..20: mol_type = other DNA
caccgtgttggccgtgtccc

SEQ ID NO: 426 - DNA, 20 bp, synthetic construct
  source 1..20: mol_type = other DNA
gccgattcggcggatggtgg

SEQ ID NO: 427 - DNA, 20 bp, synthetic construct
  source 1..20: mol_type = other DNA
ggagaggaactccgggtgga

SEQ ID NO: 428 - DNA, 20 bp, synthetic construct
  source 1..20: mol_type = other DNA
tcccataaccgtgcactcag

SEQ ID NO: 429 - DNA, 20 bp, synthetic construct
  source 1..20: mol_type = other DNA
ggtctgcgatgtgttcctcc

SEQ ID NO: 430 - DNA, 20 bp, synthetic construct
  source 1..20: mol_type = other DNA
catccaggctgcggaaccgc

SEQ ID NO: 431 - DNA, 20 bp, synthetic construct
  source 1..20: mol_type = other DNA
tgccgccggctctgctgaca

SEQ ID NO: 432 - DNA, 20 bp, synthetic construct
  source 1..20: mol_type = other DNA
gcgctccgtgcggttccgct

SEQ ID NO: 433 - DNA, 20 bp, synthetic construct
  source 1..20: mol_type = other DNA
ggaaaggccttggacagcgc

SEQ ID NO: 434 - DNA, 20 bp, synthetic construct
  source 1..20: mol_type = other DNA
gtggcaccgaggctggccgt

SEQ ID NO: 435 - DNA, 20 bp, synthetic construct
  source 1..20: mol_type = other DNA
gtcctcactctggtgcgggc

SEQ ID NO: 436 - DNA, 20 bp, synthetic construct
  source 1..20: mol_type = other DNA
gcgccggtccttggcggcct

SEQ ID NO: 437 - DNA, 20 bp, synthetic construct
  source 1..20: mol_type = other DNA
gctcggcgcggccactctgg

SEQ ID NO: 438 - DNA, 20 bp, synthetic construct
  source 1..20: mol_type = other DNA
cgtgtccacagagttgcgct

SEQ ID NO: 439 - DNA, 20 bp, synthetic construct
  source 1..20: mol_type = other DNA
ggcggacttagttacgctcc

SEQ ID NO: 440 - DNA, 20 bp, synthetic construct
  source 1..20: mol_type = other DNA
gggtggagtgtttggcggac

SEQ ID NO: 441 - DNA, 20 bp, synthetic construct
  source 1..20: mol_type = other DNA
cgtggcctgctctgtatgct

SEQ ID NO: 442 - DNA, 20 bp, synthetic construct
  source 1..20: mol_type = other DNA
gccccattcgcagggacacc

SEQ ID NO: 443 - DNA, 20 bp, synthetic construct
  source 1..20: mol_type = other DNA
gtgccccggctctggacttg

SEQ ID NO: 444 - DNA, 20 bp, synthetic construct
  source 1..20: mol_type = other DNA
gccggatggagggatcctcc

SEQ ID NO: 445 - DNA, 20 bp, synthetic construct
  source 1..20: mol_type = other DNA
tcctctgcaggcggattccc

SEQ ID NO: 446 - DNA, 20 bp, synthetic construct
  source 1..20: mol_type = other DNA
cgtggtaaggttccagatct

SEQ ID NO: 447 - DNA, 20 bp, synthetic construct
  source 1..20: mol_type = other DNA
ctcaactgcaaaccaagcgg

SEQ ID NO: 448 - DNA, 20 bp, synthetic construct
  source 1..20: mol_type = other DNA
gtgctcacccttgttagcca

SEQ ID NO: 449 - DNA, 20 bp, synthetic construct
  source 1..20: mol_type = other DNA
cctgttcaggacccaggtat

SEQ ID NO: 450 - DNA, 20 bp, synthetic construct
  source 1..20: mol_type = other DNA
cttcccctattccagtacgc

SEQ ID NO: 451 - DNA, 20 bp, synthetic construct
  source 1..20: mol_type = other DNA
aagcctgcatggtcattccc

SEQ ID NO: 452 - DNA, 20 bp, synthetic construct
  source 1..20: mol_type = other DNA
gccgaggtccatagttctgg

SEQ ID NO: 453 - DNA, 20 bp, synthetic construct
  source 1..20: mol_type = other DNA
gaccaggctgtctttcgatc

SEQ ID NO: 454 - DNA, 20 bp, synthetic construct
  source 1..20: mol_type = other DNA
tccccgatattccatgcttc

SEQ ID NO: 455 - DNA, 20 bp, synthetic construct
  source 1..20: mol_type = other DNA
cccttagccctgccgcctga

SEQ ID NO: 456 - DNA, 20 bp, synthetic construct
  source 1..20: mol_type = other DNA
ctgtcacctgcgacctcttt

SEQ ID NO: 457 - DNA, 20 bp, synthetic construct
  source 1..20: mol_type = other DNA
ctatagacttaagcctcagc

SEQ ID NO: 458 - DNA, 20 bp, synthetic construct
  source 1..20: mol_type = other DNA
gcgcccgaaatacacctggg

SEQ ID NO: 459 - DNA, 20 bp, synthetic construct
  source 1..20: mol_type = other DNA
gggtacgctgtctgcaccca

SEQ ID NO: 460 - DNA, 20 bp, synthetic construct
  source 1..20: mol_type = other DNA
gtcccccatctgccacggtc

SEQ ID NO: 461 - DNA, 20 bp, synthetic construct
  source 1..20: mol_type = other DNA
cgttttcggtttatgctatt

SEQ ID NO: 462 - DNA, 20 bp, synthetic construct
  source 1..20: mol_type = other DNA
gtccccagcttaggacttag

SEQ ID NO: 463 - DNA, 20 bp, synthetic construct
  source 1..20: mol_type = other DNA
agcttcttacagggacccaa

SEQ ID NO: 464 - DNA, 20 bp, synthetic construct
  source 1..20: mol_type = other DNA
cgttcctatgaggtcccccc

SEQ ID NO: 465 - DNA, 20 bp, synthetic construct
  source 1..20: mol_type = other DNA
aagccctcacccgctagccc

SEQ ID NO: 466 - DNA, 20 bp, synthetic construct
  source 1..20: mol_type = other DNA
ctaaccaaagctgtttgcgc

SEQ ID NO: 467 - DNA, 20 bp, synthetic construct
  source 1..20: mol_type = other DNA
ctctgctaatgaatgaacgg

SEQ ID NO: 468 - DNA, 20 bp, synthetic construct
  source 1..20: mol_type = other DNA
gcgcaatctcggccactttc

SEQ ID NO: 469 - DNA, 20 bp, synthetic construct
  source 1..20: mol_type = other DNA
gctattattaggacttgtac

SEQ ID NO: 470 - DNA, 20 bp, synthetic construct
  source 1..20: mol_type = other DNA
ccgtgttggccgtgtccctg

SEQ ID NO: 471 - DNA, 20 bp, synthetic construct
  source 1..20: mol_type = other DNA
ggctagtgtgggatctggct

SEQ ID NO: 472 - DNA, 20 bp, synthetic construct
  source 1..20: mol_type = other DNA
ccgcagctgctgagagtttg

SEQ ID NO: 473 - DNA, 20 bp, synthetic construct
  source 1..20: mol_type = other DNA
tactgaagtccctggacccc

SEQ ID NO: 474 - DNA, 20 bp, synthetic construct
  source 1..20: mol_type = other DNA
agccgtgttagcaactccct

SEQ ID NO: 475 - DNA, 20 bp, synthetic construct
  source 1..20: mol_type = other DNA
cgggtggaaaatcacctggt

SEQ ID NO: 476 - DNA, 20 bp, synthetic construct
  source 1..20: mol_type = other DNA
gacttggccacactcggctg

SEQ ID NO: 477 - DNA, 20 bp, synthetic construct
  source 1..20: mol_type = other DNA
cagactagtactatctatca

SEQ ID NO: 478 - DNA, 20 bp, synthetic construct
  source 1..20: mol_type = other DNA
ggatcgggccaaggtccatc

SEQ ID NO: 479 - DNA, 20 bp, synthetic construct
  source 1..20: mol_type = other DNA
cgcctcaacaccgccctcta

SEQ ID NO: 480 - DNA, 20 bp, synthetic construct
  source 1..20: mol_type = other DNA
aagacccctagccaggagct

SEQ ID NO: 481 - DNA, 20 bp, synthetic construct
  source 1..20: mol_type = other DNA
gccatacccctcaaacaggg

SEQ ID NO: 482 - DNA, 20 bp, synthetic construct
  source 1..20: mol_type = other DNA
gtctgaccacacctgggatt

SEQ ID NO: 483 - DNA, 20 bp, synthetic construct
  source 1..20: mol_type = other DNA
aaacctcgcagccgccagga

SEQ ID NO: 484 - DNA, 20 bp, synthetic construct
  source 1..20: mol_type = other DNA
gtgcccgacgggaagcttgc

SEQ ID NO: 485 - DNA, 20 bp, synthetic construct
  source 1..20: mol_type = other DNA
tctccaggtagggaccccgg

SEQ ID NO: 486 - DNA, 20 bp, synthetic construct
  source 1..20: mol_type = other DNA
gcagcaccgtgtagatgcca

SEQ ID NO: 487 - DNA, 20 bp, synthetic construct
  source 1..20: mol_type = other DNA
cgatgttgcaggtatcccag

SEQ ID NO: 488 - DNA, 20 bp, synthetic construct
  source 1..20: mol_type = other DNA
ggttgctacaggcagtcgcc

SEQ ID NO: 489 - DNA, 20 bp, synthetic construct
  source 1..20: mol_type = other DNA
gggctgccgccctttccatg

SEQ ID NO: 490 - DNA, 20 bp, synthetic construct
  source 1..20: mol_type = other DNA
cccgcacaaactcctggatt

SEQ ID NO: 491 - DNA, 20 bp, synthetic construct
  source 1..20: mol_type = other DNA
tctgagcagatagttgagcc

SEQ ID NO: 492 - DNA, 20 bp, synthetic construct
  source 1..20: mol_type = other DNA
aagcttcctcccgaactttt

SEQ ID NO: 493 - DNA, 20 bp, synthetic construct
  source 1..20: mol_type = other DNA
gattcggcggatggtggtca

SEQ ID NO: 494 - DNA, 20 bp, synthetic construct
  source 1..20: mol_type = other DNA
cacggacaaactcctcatag

SEQ ID NO: 495 - DNA, 20 bp, synthetic construct
  source 1..20: mol_type = other DNA
aggctgcggaaccgccggtc

SEQ ID NO: 496 - DNA, 20 bp, synthetic construct
  source 1..20: mol_type = other DNA
tgcggttccgctggatgata

SEQ ID NO: 497 - DNA, 20 bp, synthetic construct
  source 1..20: mol_type = other DNA
gggcgacggtggcaccgagg

SEQ ID NO: 498 - DNA, 20 bp, synthetic construct
  source 1..20: mol_type = other DNA
tggtgcacggatgttgcgcc

SEQ ID NO: 499 - DNA, 20 bp, synthetic construct
  source 1..20: mol_type = other DNA
ttagttacgctcctcgccca

SEQ ID NO: 500 - DNA, 20 bp, synthetic construct
  source 1..20: mol_type = other DNA
ccaccgcagagtaatggcag

SEQ ID NO: 501 - DNA, 20 bp, synthetic construct
  source 1..20: mol_type = other DNA
ccccattcgcagggacacca

SEQ ID NO: 502 - DNA, 20 bp, synthetic construct
  source 1..20: mol_type = other DNA
gttgaaatggaggaccatct

SEQ ID NO: 503 - DNA, 20 bp, synthetic construct
  source 1..20: mol_type = other DNA
gagcagttgggaataagcca

SEQ ID NO: 504 - DNA, 20 bp, synthetic construct
  source 1..20: mol_type = other DNA
ctgcaaaccaagcggtgcag

SEQ ID NO: 505 - DNA, 20 bp, synthetic construct
  source 1..20: mol_type = other DNA
tacaactcagagttccgggc

SEQ ID NO: 506 - DNA, 20 bp, synthetic construct
  source 1..20: mol_type = other DNA
ttaagtcaaacgaaccatcc

SEQ ID NO: 507 - DNA, 20 bp, synthetic construct
  source 1..20: mol_type = other DNA
tcccaggtttgcacgcagaa

SEQ ID NO: 508 - DNA, 20 bp, synthetic construct
  source 1..20: mol_type = other DNA
ccctagaccatgctgttagg

SEQ ID NO: 509 - DNA, 20 bp, synthetic construct
  source 1..20: mol_type = other DNA
actaatagctcaggccctca

SEQ ID NO: 510 - DNA, 20 bp, synthetic construct
  source 1..20: mol_type = other DNA
agcctctgactaacttagga

SEQ ID NO: 511 - DNA, 20 bp, synthetic construct
  source 1..20: mol_type = other DNA
gtgagggagaccccctcatg

SEQ ID NO: 512 - DNA, 20 bp, synthetic construct
  source 1..20: mol_type = other DNA
cgggaccccttggtctgaag

SEQ ID NO: 513 - DNA, 20 bp, synthetic construct
  source 1..20: mol_type = other DNA
ccgatggcaggctgtccacc

SEQ ID NO: 514 - DNA, 20 bp, synthetic construct
  source 1..20: mol_type = other DNA
ggatctccgtctcagtctgt

SEQ ID NO: 515 - DNA, 20 bp, synthetic construct
  source 1..20: mol_type = other DNA
ccgcccacacaatgtgctac

SEQ ID NO: 516 - DNA, 20 bp, synthetic construct
  source 1..20: mol_type = other DNA
ccctgccgcctgatggcttt

SEQ ID NO: 517 - DNA, 20 bp, synthetic construct
  source 1..20: mol_type = other DNA
aggaagcgactgggctgttc

SEQ ID NO: 518 - DNA, 20 bp, synthetic construct
  source 1..20: mol_type = other DNA
cgtgccccagggctgcattt

SEQ ID NO: 519 - DNA, 20 bp, synthetic construct
  source 1..20: mol_type = other DNA
ggcacaaggtatcacatccc

SEQ ID NO: 520 - DNA, 20 bp, synthetic construct
  source 1..20: mol_type = other DNA
gttgcaatattttccgtgcc

SEQ ID NO: 521 - DNA, 20 bp, synthetic construct
  source 1..20: mol_type = other DNA
ttgtagtttcaggtatgggt

SEQ ID NO: 522 - DNA, 20 bp, synthetic construct
  source 1..20: mol_type = other DNA
ggcatcgagagtagagcctg

SEQ ID NO: 523 - DNA, 20 bp, synthetic construct
  source 1..20: mol_type = other DNA
tcctagaattcctcgggcaa

SEQ ID NO: 524 - DNA, 20 bp, synthetic construct
  source 1..20: mol_type = other DNA
ctcaagggtacgctgtctgc

SEQ ID NO: 525 - DNA, 20 bp, synthetic construct
  source 1..20: mol_type = other DNA
catctaagtcctggcagggt

SEQ ID NO: 526 - DNA, 20 bp, synthetic construct
  source 1..20: mol_type = other DNA
ctgcagcaatcccaaccgga

SEQ ID NO: 527 - DNA, 20 bp, synthetic construct
  source 1..20: mol_type = other DNA
gttgggaaaagaatcggcaa

SEQ ID NO: 528 - DNA, 20 bp, synthetic construct
  source 1..20: mol_type = other DNA
ggttttcctggcatactcgc

SEQ ID NO: 529 - DNA, 20 bp, synthetic construct
  source 1..20: mol_type = other DNA
tacatccacatgagtccaat

SEQ ID NO: 530 - DNA, 20 bp, synthetic construct
  source 1..20: mol_type = other DNA
gcctccagagtatatagtca

SEQ ID NO: 531 - DNA, 20 bp, synthetic construct
  source 1..20: mol_type = other DNA
tagagctaaccagtcaaagg

SEQ ID NO: 532 - DNA, 20 bp, synthetic construct
  source 1..20: mol_type = other DNA
gtataagtctcctcagctac

SEQ ID NO: 533 - DNA, 20 bp, synthetic construct
  source 1..20: mol_type = other DNA
cctagatggttaggctccca

SEQ ID NO: 534 - DNA, 20 bp, synthetic construct
  source 1..20: mol_type = other DNA
gaggatgtcttaggtaatac

SEQ ID NO: 535 - DNA, 20 bp, synthetic construct
  source 1..20: mol_type = other DNA
tctccctagttataaactgc

SEQ ID NO: 536 - DNA, 20 bp, synthetic construct
  source 1..20: mol_type = other DNA
ctgctcgctgccgttcacct

SEQ ID NO: 537 - DNA, 20 bp, synthetic construct
  source 1..20: mol_type = other DNA
tgtcctgacaaccccgtctc

SEQ ID NO: 538 - DNA, 20 bp, synthetic construct
  source 1..20: mol_type = other DNA
agctagcagtgtcacacaac

SEQ ID NO: 539 - DNA, 20 bp, synthetic construct
  source 1..20: mol_type = other DNA
gtttgcgatgaggacccaat

SEQ ID NO: 540 - DNA, 20 bp, synthetic construct
  source 1..20: mol_type = other DNA
cctctggctggtaattggcc

SEQ ID NO: 541 - DNA, 20 bp, synthetic construct
  source 1..20: mol_type = other DNA
agaggtccaatccatacctg

SEQ ID NO: 542 - DNA, 20 bp, synthetic construct
  source 1..20: mol_type = other DNA
ccctaagtgcctcgcctcca

SEQ ID NO: 543 - DNA, 20 bp, synthetic construct
  source 1..20: mol_type = other DNA
ggcccgataaaactaccact

SEQ ID NO: 544 - DNA, 20 bp, synthetic construct
  source 1..20: mol_type = other DNA
cctagactcaatagaatgac

SEQ ID NO: 545 - DNA, 20 bp, synthetic construct
  source 1..20: mol_type = other DNA
acttagctgtctgggtttcc

SEQ ID NO: 546 - DNA, 20 bp, synthetic construct
  source 1..20: mol_type = other DNA
acaactcccagcatcccgat

SEQ ID NO: 547 - DNA, 20 bp, synthetic construct
  source 1..20: mol_type = other DNA
attcccactagtacaacctg

SEQ ID NO: 548 - DNA, 20 bp, synthetic construct
  source 1..20: mol_type = other DNA
aagcttgtctagcatcacac

SEQ ID NO: 549 - DNA, 20 bp, synthetic construct
  source 1..20: mol_type = other DNA
aggatgccatgaccacgctg

SEQ ID NO: 550 - DNA, 20 bp, synthetic construct
  source 1..20: mol_type = other DNA
acgcgctgtagcagaacagg

SEQ ID NO: 551 - DNA, 20 bp, synthetic construct
  source 1..20: mol_type = other DNA
acttggccacactcggctgt

SEQ ID NO: 552 - DNA, 20 bp, synthetic construct
  source 1..20: mol_type = other DNA
ggttcccccgccgctgttct

SEQ ID NO: 553 - DNA, 20 bp, synthetic construct
  source 1..20: mol_type = other DNA
ggccaaggtccatcattcta

SEQ ID NO: 554 - DNA, 20 bp, synthetic construct
  source 1..20: mol_type = other DNA
tccaagatgcgggaaagtcc

SEQ ID NO: 555 - DNA, 20 bp, synthetic construct
  source 1..20: mol_type = other DNA
tccctcatcgcctaccgtct

SEQ ID NO: 556 - DNA, 20 bp, synthetic construct
  source 1..20: mol_type = other DNA
cctctcccagcggcccgaga

SEQ ID NO: 557 - DNA, 20 bp, synthetic construct
  source 1..20: mol_type = other DNA
cggcctggttcattgcttaa

SEQ ID NO: 558 - DNA, 20 bp, synthetic construct
  source 1..20: mol_type = other DNA
gagccatacccctcaaacag

SEQ ID NO: 559 - DNA, 20 bp, synthetic construct
  source 1..20: mol_type = other DNA
ctttagctcctggctaagca

SEQ ID NO: 560 - DNA, 20 bp, synthetic construct
  source 1..20: mol_type = other DNA
tgaaacctcgcagccgccag

SEQ ID NO: 561 - DNA, 20 bp, synthetic construct
  source 1..20: mol_type = other DNA
tggtgcccgacgggaagctt

SEQ ID NO: 562 - DNA, 20 bp, synthetic construct
  source 1..20: mol_type = other DNA
atctccaggtagggaccccg

SEQ ID NO: 563 - DNA, 20 bp, synthetic construct
  source 1..20: mol_type = other DNA
tgcagcaccgtgtagatgcc

SEQ ID NO: 564 - DNA, 20 bp, synthetic construct
  source 1..20: mol_type = other DNA
ctccgatgttgcaggtatcc

SEQ ID NO: 565 - DNA, 20 bp, synthetic construct
  source 1..20: mol_type = other DNA
tggttgctacaggcagtcgc

SEQ ID NO: 566 - DNA, 20 bp, synthetic construct
  source 1..20: mol_type = other DNA
tgggctgccgccctttccat

SEQ ID NO: 567 - DNA, 20 bp, synthetic construct
  source 1..20: mol_type = other DNA
gccccgcacaaactcctgga

SEQ ID NO: 568 - DNA, 20 bp, synthetic construct
  source 1..20: mol_type = other DNA
ctctgagcagatagttgagc

SEQ ID NO: 569 - DNA, 20 bp, synthetic construct
  source 1..20: mol_type = other DNA
aaagcttcctcccgaacttt

SEQ ID NO: 570 - DNA, 20 bp, synthetic construct
  source 1..20: mol_type = other DNA
cgattcggcggatggtggtc

SEQ ID NO: 571 - DNA, 20 bp, synthetic construct
  source 1..20: mol_type = other DNA
ccacggacaaactcctcata

SEQ ID NO: 572 - DNA, 20 bp, synthetic construct
  source 1..20: mol_type = other DNA
caggctgcggaaccgccggt

SEQ ID NO: 573 - DNA, 20 bp, synthetic construct
  source 1..20: mol_type = other DNA
gtgcggttccgctggatgat

SEQ ID NO: 574 - DNA, 20 bp, synthetic construct
  source 1..20: mol_type = other DNA
agggcgacggtggcaccgag

SEQ ID NO: 575 - DNA, 20 bp, synthetic construct
  source 1..20: mol_type = other DNA
ctggtgcacggatgttgcgc

SEQ ID NO: 576 - DNA, 20 bp, synthetic construct
  source 1..20: mol_type = other DNA
acttagttacgctcctcgcc

SEQ ID NO: 577 - DNA, 20 bp, synthetic construct
  source 1..20: mol_type = other DNA
accaccgcagagtaatggca

SEQ ID NO: 578 - DNA, 20 bp, synthetic construct
  source 1..20: mol_type = other DNA
tcgccccattcgcagggaca

SEQ ID NO: 579 - DNA, 20 bp, synthetic construct
  source 1..20: mol_type = other DNA
agttgaaatggaggaccatc

SEQ ID NO: 580 - DNA, 20 bp, synthetic construct
  source 1..20: mol_type = other DNA
tagtggtttcacagtgggca

SEQ ID NO: 581 - DNA, 20 bp, synthetic construct
  source 1..20: mol_type = other DNA
actgcaaaccaagcggtgca

SEQ ID NO: 582 - DNA, 20 bp, synthetic construct
  source 1..20: mol_type = other DNA
ctacaactcagagttccggg

SEQ ID NO: 583 - DNA, 20 bp, synthetic construct
  source 1..20: mol_type = other DNA
cttaagtcaaacgaaccatc

SEQ ID NO: 584 - DNA, 20 bp, synthetic construct
  source 1..20: mol_type = other DNA
ttcccaggtttgcacgcaga

SEQ ID NO: 585 - DNA, 20 bp, synthetic construct
  source 1..20: mol_type = other DNA
cccctagaccatgctgttag

SEQ ID NO: 586 - DNA, 20 bp, synthetic construct
  source 1..20: mol_type = other DNA
aactaatagctcaggccctc

SEQ ID NO: 587 - DNA, 20 bp, synthetic construct
  source 1..20: mol_type = other DNA
cagcctctgactaacttagg

SEQ ID NO: 588 - DNA, 20 bp, synthetic construct
  source 1..20: mol_type = other DNA
agtgagggagaccccctcat

SEQ ID NO: 589 - DNA, 20 bp, synthetic construct
  source 1..20: mol_type = other DNA
ccgggaccccttggtctgaa

SEQ ID NO: 590 - DNA, 20 bp, synthetic construct
  source 1..20: mol_type = other DNA
cccgatggcaggctgtccac

SEQ ID NO: 591 - DNA, 20 bp, synthetic construct
  source 1..20: mol_type = other DNA
tggatctccgtctcagtctg

SEQ ID NO: 592 - DNA, 20 bp, synthetic construct
  source 1..20: mol_type = other DNA
accgcccacacaatgtgcta

SEQ ID NO: 593 - DNA, 20 bp, synthetic construct
  source 1..20: mol_type = other DNA
tagccctgccgcctgatggc

SEQ ID NO: 594 - DNA, 20 bp, synthetic construct
  source 1..20: mol_type = other DNA
caggaagcgactgggctgtt

SEQ ID NO: 595 - DNA, 20 bp, synthetic construct
  source 1..20: mol_type = other DNA
atcctctgtccgtgccccag

SEQ ID NO: 596 - DNA, 20 bp, synthetic construct
  source 1..20: mol_type = other DNA
gccacctaaagcaggccctt

SEQ ID NO: 597 - DNA, 20 bp, synthetic construct
  source 1..20: mol_type = other DNA
tgttgcaatattttccgtgc

SEQ ID NO: 598 - DNA, 20 bp, synthetic construct
  source 1..20: mol_type = other DNA
attgtagtttcaggtatggg

SEQ ID NO: 599 - DNA, 20 bp, synthetic construct
  source 1..20: mol_type = other DNA
tggcatcgagagtagagcct

SEQ ID NO: 600 - DNA, 20 bp, synthetic construct
  source 1..20: mol_type = other DNA
ctcctagaattcctcgggca

SEQ ID NO: 601 - DNA, 20 bp, synthetic construct
  source 1..20: mol_type = other DNA
tctcaagggtacgctgtctg

SEQ ID NO: 602 - DNA, 20 bp, synthetic construct
  source 1..20: mol_type = other DNA
aaccatctaagtcctggcag

SEQ ID NO: 603 - DNA, 20 bp, synthetic construct
  source 1..20: mol_type = other DNA
actgcagcaatcccaaccgg

SEQ ID NO: 604 - DNA, 20 bp, synthetic construct
  source 1..20: mol_type = other DNA
tgttgggaaaagaatcggca

SEQ ID NO: 605 - DNA, 20 bp, synthetic construct
  source 1..20: mol_type = other DNA
gggttttcctggcatactcg

SEQ ID NO: 606 - DNA, 20 bp, synthetic construct
  source 1..20: mol_type = other DNA
ggatggtccaagttatgatt

SEQ ID NO: 607 - DNA, 20 bp, synthetic construct
  source 1..20: mol_type = other DNA
agcctccagagtatatagtc

SEQ ID NO: 608 - DNA, 20 bp, synthetic construct
  source 1..20: mol_type = other DNA
atagagctaaccagtcaaag

SEQ ID NO: 609 - DNA, 20 bp, synthetic construct
  source 1..20: mol_type = other DNA
acaagtataagtctcctcag

SEQ ID NO: 610 - DNA, 20 bp, synthetic construct
  source 1..20: mol_type = other DNA
acctagatggttaggctccc

SEQ ID NO: 611 - DNA, 20 bp, synthetic construct
  source 1..20: mol_type = other DNA
cagaggatgtcttaggtaat

SEQ ID NO: 612 - DNA, 20 bp, synthetic construct
  source 1..20: mol_type = other DNA
gttctccctagttataaact

SEQ ID NO: 613 - DNA, 20 bp, synthetic construct
  source 1..20: mol_type = other DNA
tctgctcgctgccgttcacc

SEQ ID NO: 614 - DNA, 20 bp, synthetic construct
  source 1..20: mol_type = other DNA
gcctgtcctgacaaccccgt

SEQ ID NO: 615 - DNA, 20 bp, synthetic construct
  source 1..20: mol_type = other DNA
gtaaagctagcagtgtcaca

SEQ ID NO: 616 - DNA, 20 bp, synthetic construct
  source 1..20: mol_type = other DNA
ggtttgcgatgaggacccaa

SEQ ID NO: 617 - DNA, 20 bp, synthetic construct
  source 1..20: mol_type = other DNA
acctctggctggtaattggc

SEQ ID NO: 618 - DNA, 20 bp, synthetic construct
  source 1..20: mol_type = other DNA
cacagaggtccaatccatac

SEQ ID NO: 619 - DNA, 20 bp, synthetic construct
  source 1..20: mol_type = other DNA
accctaagtgcctcgcctcc

SEQ ID NO: 620 - DNA, 20 bp, synthetic construct
  source 1..20: mol_type = other DNA
tggcccgataaaactaccac

SEQ ID NO: 621 - DNA, 20 bp, synthetic construct
  source 1..20: mol_type = other DNA
ccctagactcaatagaatga

SEQ ID NO: 622 - DNA, 20 bp, synthetic construct
  source 1..20: mol_type = other DNA
acaacttagctgtctgggtt

SEQ ID NO: 623 - DNA, 20 bp, synthetic construct
  source 1..20: mol_type = other DNA
tacaactcccagcatcccga

SEQ ID NO: 624 - DNA, 20 bp, synthetic construct
  source 1..20: mol_type = other DNA
gattcccactagtacaacct

SEQ ID NO: 625 - DNA, 20 bp, synthetic construct
  source 1..20: mol_type = other DNA
ggtaaaaagcttgtctagca

SEQ ID NO: 626 - DNA, 20 bp, synthetic construct
  source 1..20: mol_type = other DNA
taggatgccatgaccacgct

SEQ ID NO: 627 - DNA, 20 bp, synthetic construct
  source 1..20: mol_type = other DNA
cacgcgctgtagcagaacag

SEQ ID NO: 628 - DNA, 20 bp, synthetic construct
  source 1..20: mol_type = other DNA
agacttggccacactcggct

SEQ ID NO: 629 - DNA, 20 bp, synthetic construct
  source 1..20: mol_type = other DNA
tggttcccccgccgctgttc

SEQ ID NO: 630 - DNA, 20 bp, synthetic construct
  source 1..20: mol_type = other DNA
cgggccaaggtccatcattc

SEQ ID NO: 631 - DNA, 20 bp, synthetic construct
  source 1..20: mol_type = other DNA
ctccaagatgcgggaaagtc

SEQ ID NO: 632 - DNA, 20 bp, synthetic construct
  source 1..20: mol_type = other DNA
ttccctcatcgcctaccgtc

SEQ ID NO: 633 - DNA, 20 bp, synthetic construct
  source 1..20: mol_type = other DNA
gggagatcttcatggtctcc

SEQ ID NO: 634 - DNA, 20 bp, synthetic construct
  source 1..20: mol_type = other DNA
tcggcctggttcattgctta

SEQ ID NO: 635 - DNA, 20 bp, synthetic construct
  source 1..20: mol_type = other DNA
ctgagccatacccctcaaac

SEQ ID NO: 636 - DNA, 20 bp, synthetic construct
  source 1..20: mol_type = other DNA
cctttagctcctggctaagc

SEQ ID NO: 637 - DNA, 20 bp, synthetic construct
  source 1..20: mol_type = other DNA
gtgaaacctcgcagccgcca

SEQ ID NO: 638 - DNA, 20 bp, synthetic construct
  source 1..20: mol_type = other DNA
ctggtgcccgacgggaagct

SEQ ID NO: 639 - DNA, 20 bp, synthetic construct
  source 1..20: mol_type = other DNA
ggatctccaggtagggaccc

SEQ ID NO: 640 - DNA, 20 bp, synthetic construct
  source 1..20: mol_type = other DNA
tctgcagcaccgtgtagatg

SEQ ID NO: 641 - DNA, 20 bp, synthetic construct
  source 1..20: mol_type = other DNA
actccgatgttgcaggtatc

SEQ ID NO: 642 - DNA, 20 bp, synthetic construct
  source 1..20: mol_type = other DNA
gatggttgctacaggcagtc

SEQ ID NO: 643 - DNA, 20 bp, synthetic construct
  source 1..20: mol_type = other DNA
gtgggctgccgccctttcca

SEQ ID NO: 644 - DNA, 20 bp, synthetic construct
  source 1..20: mol_type = other DNA
aatggccccgcacaaactcc

SEQ ID NO: 645 - DNA, 20 bp, synthetic construct
  source 1..20: mol_type = other DNA
actctgagcagatagttgag

SEQ ID NO: 646 - DNA, 20 bp, synthetic construct
  source 1..20: mol_type = other DNA
taaagcttcctcccgaactt

SEQ ID NO: 647 - DNA, 20 bp, synthetic construct
  source 1..20: mol_type = other DNA
ccgattcggcggatggtggt

SEQ ID NO: 648 - DNA, 20 bp, synthetic construct
  source 1..20: mol_type = other DNA
gccacggacaaactcctcat

SEQ ID NO: 649 - DNA, 20 bp, synthetic construct
  source 1..20: mol_type = other DNA
tccaggctgcggaaccgccg

SEQ ID NO: 650 - DNA, 20 bp, synthetic construct
  source 1..20: mol_type = other DNA
cgtgcggttccgctggatga

SEQ ID NO: 651 - DNA, 20 bp, synthetic construct
  source 1..20: mol_type = other DNA
gagggcgacggtggcaccga

SEQ ID NO: 652 - DNA, 20 bp, synthetic construct
  source 1..20: mol_type = other DNA
ctctggtgcacggatgttgc

SEQ ID NO: 653 - DNA, 20 bp, synthetic construct
  source 1..20: mol_type = other DNA
gacttagttacgctcctcgc

SEQ ID NO: 654 - DNA, 20 bp, synthetic construct
  source 1..20: mol_type = other DNA
caccaccgcagagtaatggc

SEQ ID NO: 655 - DNA, 20 bp, synthetic construct
  source 1..20: mol_type = other DNA
atcgccccattcgcagggac

SEQ ID NO: 656 - DNA, 20 bp, synthetic construct
  source 1..20: mol_type = other DNA
gagttgaaatggaggaccat

SEQ ID NO: 657 - DNA, 20 bp, synthetic construct
  source 1..20: mol_type = other DNA
ctagtggtttcacagtgggc

SEQ ID NO: 658 - DNA, 20 bp, synthetic construct
  source 1..20: mol_type = other DNA
aactgcaaaccaagcggtgc

SEQ ID NO: 659 - DNA, 20 bp, synthetic construct
  source 1..20: mol_type = other DNA
cctacaactcagagttccgg

SEQ ID NO: 660 - DNA, 20 bp, synthetic construct
  source 1..20: mol_type = other DNA
tcttaagtcaaacgaaccat

SEQ ID NO: 661 - DNA, 20 bp, synthetic construct
  source 1..20: mol_type = other DNA
cttcccaggtttgcacgcag

SEQ ID NO: 662 - DNA, 20 bp, synthetic construct
  source 1..20: mol_type = other DNA
tcccctagaccatgctgtta

SEQ ID NO: 663 - DNA, 20 bp, synthetic construct
  source 1..20: mol_type = other DNA
gaactaatagctcaggccct

SEQ ID NO: 664 - DNA, 20 bp, synthetic construct
  source 1..20: mol_type = other DNA
tcgcagccaggctccaaaac

SEQ ID NO: 665 - DNA, 20 bp, synthetic construct
  source 1..20: mol_type = other DNA
gccgggaccccttggtctga

SEQ ID NO: 666 - DNA, 20 bp, synthetic construct
  source 1..20: mol_type = other DNA
ccaccccgatggcaggctgt

SEQ ID NO: 667 - DNA, 20 bp, synthetic construct
  source 1..20: mol_type = other DNA
ttggatctccgtctcagtct

SEQ ID NO: 668 - DNA, 20 bp, synthetic construct
  source 1..20: mol_type = other DNA
tcaccgcccacacaatgtgc

SEQ ID NO: 669 - DNA, 20 bp, synthetic construct
  source 1..20: mol_type = other DNA
ttagccctgccgcctgatgg

SEQ ID NO: 670 - DNA, 20 bp, synthetic construct
  source 1..20: mol_type = other DNA
tcaggaagcgactgggctgt

SEQ ID NO: 671 - DNA, 20 bp, synthetic construct
  source 1..20: mol_type = other DNA
tagcccatcctctgtccgtg

SEQ ID NO: 672 - DNA, 20 bp, synthetic construct
  source 1..20: mol_type = other DNA
cacctcacctcctacaggcg

SEQ ID NO: 673 - DNA, 20 bp, synthetic construct
  source 1..20: mol_type = other DNA
ctgttgcaatattttccgtg

SEQ ID NO: 674 - DNA, 20 bp, synthetic construct
  source 1..20: mol_type = other DNA
cattgtagtttcaggtatgg

SEQ ID NO: 675 - DNA, 20 bp, synthetic construct
  source 1..20: mol_type = other DNA
ttggcatcgagagtagagcc

SEQ ID NO: 676 - DNA, 20 bp, synthetic construct
  source 1..20: mol_type = other DNA
actcctagaattcctcgggc

SEQ ID NO: 677 - DNA, 20 bp, synthetic construct
  source 1..20: mol_type = other DNA
gtctcaagggtacgctgtct

SEQ ID NO: 678 - DNA, 20 bp, synthetic construct
  source 1..20: mol_type = other DNA
caaccatctaagtcctggca

SEQ ID NO: 679 - DNA, 20 bp, synthetic construct
  source 1..20: mol_type = other DNA
cactgcagcaatcccaaccg

SEQ ID NO: 680 - DNA, 20 bp, synthetic construct
  source 1..20: mol_type = other DNA
gtgttgggaaaagaatcggc

SEQ ID NO: 681 - DNA, 20 bp, synthetic construct
  source 1..20: mol_type = other DNA
ttgggccccccagagctttg

SEQ ID NO: 682 - DNA, 20 bp, synthetic construct
  source 1..20: mol_type = other DNA
aggatggtccaagttatgat

SEQ ID NO: 683 - DNA, 20 bp, synthetic construct
  source 1..20: mol_type = other DNA
accaatctacattagccaat

SEQ ID NO: 684 - DNA, 20 bp, synthetic construct
  source 1..20: mol_type = other DNA
tatagagctaaccagtcaaa

SEQ ID NO: 685 - DNA, 20 bp, synthetic construct
  source 1..20: mol_type = other DNA
agcacaagtataagtctcct

SEQ ID NO: 686 - DNA, 20 bp, synthetic construct
  source 1..20: mol_type = other DNA
gacctagatggttaggctcc

SEQ ID NO: 687 - DNA, 20 bp, synthetic construct
  source 1..20: mol_type = other DNA
gcagaggatgtcttaggtaa

SEQ ID NO: 688 - DNA, 20 bp, synthetic construct
  source 1..20: mol_type = other DNA
tcacggccccccaccatact

SEQ ID NO: 689 - DNA, 20 bp, synthetic construct
  source 1..20: mol_type = other DNA
gggctgctaaccaaagctgt

SEQ ID NO: 690 - DNA, 20 bp, synthetic construct
  source 1..20: mol_type = other DNA
ggcctgtcctgacaaccccg

SEQ ID NO: 691 - DNA, 20 bp, synthetic construct
  source 1..20: mol_type = other DNA
caagtaaagctagcagtgtc

SEQ ID NO: 692 - DNA, 20 bp, synthetic construct
  source 1..20: mol_type = other DNA
aggtttgcgatgaggaccca

SEQ ID NO: 693 - DNA, 20 bp, synthetic construct
  source 1..20: mol_type = other DNA
tgacctctggctggtaattg

SEQ ID NO: 694 - DNA, 20 bp, synthetic construct
  source 1..20: mol_type = other DNA
tgcacagaggtccaatccat

SEQ ID NO: 695 - DNA, 20 bp, synthetic construct
  source 1..20: mol_type = other DNA
caccctaagtgcctcgcctc

SEQ ID NO: 696 - DNA, 20 bp, synthetic construct
  source 1..20: mol_type = other DNA
agtggcccgataaaactacc

SEQ ID NO: 697 - DNA, 20 bp, synthetic construct
  source 1..20: mol_type = other DNA
cccctagactcaatagaatg

SEQ ID NO: 698 - DNA, 20 bp, synthetic construct
  source 1..20: mol_type = other DNA
tacaacttagctgtctgggt

SEQ ID NO: 699 - DNA, 20 bp, synthetic construct
  source 1..20: mol_type = other DNA
cccgagaaactacaactccc

SEQ ID NO: 700 - DNA, 20 bp, synthetic construct
  source 1..20: mol_type = other DNA
ggattcccactagtacaacc

SEQ ID NO: 701 - DNA, 20 bp, synthetic construct
  source 1..20: mol_type = other DNA
gggtaaaaagcttgtctagc

SEQ ID NO: 702 - DNA, 20 bp, synthetic construct
  source 1..20: mol_type = other DNA
ctaggatgccatgaccacgc

SEQ ID NO: 703 - DNA, 20 bp, synthetic construct
  source 1..20: mol_type = other DNA
gcacgcgctgtagcagaaca

SEQ ID NO: 704 - DNA, 20 bp, synthetic construct
  source 1..20: mol_type = other DNA
gagacttggccacactcggc

SEQ ID NO: 705 - DNA, 20 bp, synthetic construct
  source 1..20: mol_type = other DNA
gtggttcccccgccgctgtt

SEQ ID NO: 706 - DNA, 20 bp, synthetic construct
  source 1..20: mol_type = other DNA
tcgggccaaggtccatcatt

SEQ ID NO: 707 - DNA, 20 bp, synthetic construct
  source 1..20: mol_type = other DNA
gctccaagatgcgggaaagt

SEQ ID NO: 708 - DNA, 20 bp, synthetic construct
  source 1..20: mol_type = other DNA
cttccctcatcgcctaccgt

SEQ ID NO: 709 - DNA, 20 bp, synthetic construct
  source 1..20: mol_type = other DNA
tagatacctgtggaggccag

SEQ ID NO: 710 - DNA, 20 bp, synthetic construct
  source 1..20: mol_type = other DNA
gatcggcctggttcattgct

SEQ ID NO: 711 - DNA, 20 bp, synthetic construct
  source 1..20: mol_type = other DNA
gtttctgagccatacccctc

SEQ ID NO: 712 - DNA, 20 bp, synthetic construct
  source 1..20: mol_type = other DNA
ccctttagctcctggctaag

SEQ ID NO: 713 - DNA, 20 bp, synthetic construct
  source 1..20: mol_type = other DNA
agtgaaacctcgcagccgcc

SEQ ID NO: 714 - DNA, 20 bp, synthetic construct
  source 1..20: mol_type = other DNA
agctggtgcccgacgggaag

SEQ ID NO: 715 - DNA, 20 bp, synthetic construct
  source 1..20: mol_type = other DNA
ttaaaggcatggctggcgca

SEQ ID NO: 716 - DNA, 20 bp, synthetic construct
  source 1..20: mol_type = other DNA
gtctgcagcaccgtgtagat

SEQ ID NO: 717 - DNA, 20 bp, synthetic construct
  source 1..20: mol_type = other DNA
gcactccgatgttgcaggta

SEQ ID NO: 718 - DNA, 20 bp, synthetic construct
  source 1..20: mol_type = other DNA
agatggttgctacaggcagt

SEQ ID NO: 719 - DNA, 20 bp, synthetic construct
  source 1..20: mol_type = other DNA
cagtgggctgccgccctttc

SEQ ID NO: 720 - DNA, 20 bp, synthetic construct
  source 1..20: mol_type = other DNA
aaatggccccgcacaaactc

SEQ ID NO: 721 - DNA, 20 bp, synthetic construct
  source 1..20: mol_type = other DNA
cactctgagcagatagttga

SEQ ID NO: 722 - DNA, 20 bp, synthetic construct
  source 1..20: mol_type = other DNA
ataaagcttcctcccgaact

SEQ ID NO: 723 - DNA, 20 bp, synthetic construct
  source 1..20: mol_type = other DNA
ggccgattcggcggatggtg

SEQ ID NO: 724 - DNA, 20 bp, synthetic construct
  source 1..20: mol_type = other DNA
cagccacggacaaactcctc

SEQ ID NO: 725 - DNA, 20 bp, synthetic construct
  source 1..20: mol_type = other DNA
tcatccaggctgcggaaccg

SEQ ID NO: 726 - DNA, 20 bp, synthetic construct
  source 1..20: mol_type = other DNA
tccgtgcggttccgctggat

SEQ ID NO: 727 - DNA, 20 bp, synthetic construct
  source 1..20: mol_type = other DNA
cgagggcgacggtggcaccg

SEQ ID NO: 728 - DNA, 20 bp, synthetic construct
  source 1..20: mol_type = other DNA
actctggtgcacggatgttg

SEQ ID NO: 729 - DNA, 20 bp, synthetic construct
  source 1..20: mol_type = other DNA
cggacttagttacgctcctc

SEQ ID NO: 730 - DNA, 20 bp, synthetic construct
  source 1..20: mol_type = other DNA
gcaccaccgcagagtaatgg

SEQ ID NO: 731 - DNA, 20 bp, synthetic construct
  source 1..20: mol_type = other DNA
tgatcgccccattcgcaggg

SEQ ID NO: 732 - DNA, 20 bp, synthetic construct
  source 1..20: mol_type = other DNA
agggctagaacatccctccc

SEQ ID NO: 733 - DNA, 20 bp, synthetic construct
  source 1..20: mol_type = other DNA
acctagtggtttcacagtgg

SEQ ID NO: 734 - DNA, 20 bp, synthetic construct
  source 1..20: mol_type = other DNA
caactgcaaaccaagcggtg

SEQ ID NO: 735 - DNA, 20 bp, synthetic construct
  source 1..20: mol_type = other DNA
tcctacaactcagagttccg

SEQ ID NO: 736 - DNA, 20 bp, synthetic construct
  source 1..20: mol_type = other DNA
catcttaagtcaaacgaacc

SEQ ID NO: 737 - DNA, 20 bp, synthetic construct
  source 1..20: mol_type = other DNA
gcttcccaggtttgcacgca

SEQ ID NO: 738 - DNA, 20 bp, synthetic construct
  source 1..20: mol_type = other DNA
atcccctagaccatgctgtt

SEQ ID NO: 739 - DNA, 20 bp, synthetic construct
  source 1..20: mol_type = other DNA
ggaactaatagctcaggccc

SEQ ID NO: 740 - DNA, 20 bp, synthetic construct
  source 1..20: mol_type = other DNA
ggtgtgagattggcttgttc

SEQ ID NO: 741 - DNA, 20 bp, synthetic construct
  source 1..20: mol_type = other DNA
atcgcagccaggctccaaaa

SEQ ID NO: 742 - DNA, 20 bp, synthetic construct
  source 1..20: mol_type = other DNA
tgccgggaccccttggtctg

SEQ ID NO: 743 - DNA, 20 bp, synthetic construct
  source 1..20: mol_type = other DNA
tggctcccaccccgatggca

SEQ ID NO: 744 - DNA, 20 bp, synthetic construct
  source 1..20: mol_type = other DNA
cttggatctccgtctcagtc

SEQ ID NO: 745 - DNA, 20 bp, synthetic construct
  source 1..20: mol_type = other DNA
atcaccgcccacacaatgtg

SEQ ID NO: 746 - DNA, 20 bp, synthetic construct
  source 1..20: mol_type = other DNA
cttagccctgccgcctgatg

SEQ ID NO: 747 - DNA, 20 bp, synthetic construct
  source 1..20: mol_type = other DNA
attcttaggcccccagcacg

SEQ ID NO: 748 - DNA, 20 bp, synthetic construct
  source 1..20: mol_type = other DNA
ctaacatagcccatcctctg

SEQ ID NO: 749 - DNA, 20 bp, synthetic construct
  source 1..20: mol_type = other DNA
cacgggatgcttcttttttg

SEQ ID NO: 750 - DNA, 20 bp, synthetic construct
  source 1..20: mol_type = other DNA
ctctgttgcaatattttccg

SEQ ID NO: 751 - DNA, 20 bp, synthetic construct
  source 1..20: mol_type = other DNA
ggtcattgtagtttcaggta

SEQ ID NO: 752 - DNA, 20 bp, synthetic construct
  source 1..20: mol_type = other DNA
gttggcatcgagagtagagc

SEQ ID NO: 753 - DNA, 20 bp, synthetic construct
  source 1..20: mol_type = other DNA
aactcctagaattcctcggg

SEQ ID NO: 754 - DNA, 20 bp, synthetic construct
  source 1..20: mol_type = other DNA
tgtctcaagggtacgctgtc

SEQ ID NO: 755 - DNA, 20 bp, synthetic construct
  source 1..20: mol_type = other DNA
ccaaccatctaagtcctggc

SEQ ID NO: 756 - DNA, 20 bp, synthetic construct
  source 1..20: mol_type = other DNA
cggcccactgcagcaatccc

SEQ ID NO: 757 - DNA, 20 bp, synthetic construct
  source 1..20: mol_type = other DNA
agtgttgggaaaagaatcgg

SEQ ID NO: 758 - DNA, 20 bp, synthetic construct
  source 1..20: mol_type = other DNA
cttgggccccccagagcttt

SEQ ID NO: 759 - DNA, 20 bp, synthetic construct
  source 1..20: mol_type = other DNA
taggatggtccaagttatga

SEQ ID NO: 760 - DNA, 20 bp, synthetic construct
  source 1..20: mol_type = other DNA
agaccaatctacattagcca

SEQ ID NO: 761 - DNA, 20 bp, synthetic construct
  source 1..20: mol_type = other DNA
atatagagctaaccagtcaa

SEQ ID NO: 762 - DNA, 20 bp, synthetic construct
  source 1..20: mol_type = other DNA
ggttcacaagcacaagtata

SEQ ID NO: 763 - DNA, 20 bp, synthetic construct
  source 1..20: mol_type = other DNA
agacctagatggttaggctc

SEQ ID NO: 764 - DNA, 20 bp, synthetic construct
  source 1..20: mol_type = other DNA
ggcagaggatgtcttaggta

SEQ ID NO: 765 - DNA, 20 bp, synthetic construct
  source 1..20: mol_type = other DNA
atactcccctcacggccccc

SEQ ID NO: 766 - DNA, 20 bp, synthetic construct
  source 1..20: mol_type = other DNA
gagggctgctaaccaaagct

SEQ ID NO: 767 - DNA, 20 bp, synthetic construct
  source 1..20: mol_type = other DNA
acaagtaaagctagcagtgt

SEQ ID NO: 768 - DNA, 20 bp, synthetic construct
  source 1..20: mol_type = other DNA
aacctcagaggtttgcgatg

SEQ ID NO: 769 - DNA, 20 bp, synthetic construct
  source 1..20: mol_type = other DNA
gttaggcttctttagttagt

SEQ ID NO: 770 - DNA, 20 bp, synthetic construct
  source 1..20: mol_type = other DNA
tctgcacagaggtccaatcc

SEQ ID NO: 771 - DNA, 20 bp, synthetic construct
  source 1..20: mol_type = other DNA
ccaccctaagtgcctcgcct

SEQ ID NO: 772 - DNA, 20 bp, synthetic construct
  source 1..20: mol_type = other DNA
aagtggcccgataaaactac

SEQ ID NO: 773 - DNA, 20 bp, synthetic construct
  source 1..20: mol_type = other DNA
gcccctagactcaatagaat

SEQ ID NO: 774 - DNA, 20 bp, synthetic construct
  source 1..20: mol_type = other DNA
gtttctacaacttagctgtc

SEQ ID NO: 775 - DNA, 20 bp, synthetic construct
  source 1..20: mol_type = other DNA
gcccgagaaactacaactcc

SEQ ID NO: 776 - DNA, 20 bp, synthetic construct
  source 1..20: mol_type = other DNA
tggattcccactagtacaac

SEQ ID NO: 777 - DNA, 20 bp, synthetic construct
  source 1..20: mol_type = other DNA
tgagatcccaaggtggccca

SEQ ID NO: 778 - DNA, 20 bp, synthetic construct
  source 1..20: mol_type = other DNA
actaggatgccatgaccacg

SEQ ID NO: 779 - DNA, 20 bp, synthetic construct
  source 1..20: mol_type = other DNA
aagcacgcgctgtagcagaa

SEQ ID NO: 780 - DNA, 20 bp, synthetic construct
  source 1..20: mol_type = other DNA
ggagacttggccacactcgg

SEQ ID NO: 781 - DNA, 20 bp, synthetic construct
  source 1..20: mol_type = other DNA
gggtggttcccccgccgctg

SEQ ID NO: 782 - DNA, 20 bp, synthetic construct
  source 1..20: mol_type = other DNA
atcgggccaaggtccatcat

SEQ ID NO: 783 - DNA, 20 bp, synthetic construct
  source 1..20: mol_type = other DNA
tgctccaagatgcgggaaag

SEQ ID NO: 784 - DNA, 20 bp, synthetic construct
  source 1..20: mol_type = other DNA
agcttccctcatcgcctacc

SEQ ID NO: 785 - DNA, 20 bp, synthetic construct
  source 1..20: mol_type = other DNA
gtagatacctgtggaggcca

SEQ ID NO: 786 - DNA, 20 bp, synthetic construct
  source 1..20: mol_type = other DNA
cgatcggcctggttcattgc

SEQ ID NO: 787 - DNA, 20 bp, synthetic construct
  source 1..20: mol_type = other DNA
agtttctgagccatacccct

SEQ ID NO: 788 - DNA, 20 bp, synthetic construct
  source 1..20: mol_type = other DNA
gccctttagctcctggctaa

SEQ ID NO: 789 - DNA, 20 bp, synthetic construct
  source 1..20: mol_type = other DNA
gcagtgaaacctcgcagccg

SEQ ID NO: 790 - DNA, 20 bp, synthetic construct
  source 1..20: mol_type = other DNA
tagctggtgcccgacgggaa

SEQ ID NO: 791 - DNA, 20 bp, synthetic construct
  source 1..20: mol_type = other DNA
tttaaaggcatggctggcgc

SEQ ID NO: 792 - DNA, 20 bp, synthetic construct
  source 1..20: mol_type = other DNA
cgtcccctgtcaccttcgcc

SEQ ID NO: 793 - DNA, 20 bp, synthetic construct
  source 1..20: mol_type = other DNA
ggcactccgatgttgcaggt

SEQ ID NO: 794 - DNA, 20 bp, synthetic construct
  source 1..20: mol_type = other DNA
tgaagatggttgctacaggc

SEQ ID NO: 795 - DNA, 20 bp, synthetic construct
  source 1..20: mol_type = other DNA
gcagtgggctgccgcccttt

SEQ ID NO: 796 - DNA, 20 bp, synthetic construct
  source 1..20: mol_type = other DNA
aaaatggccccgcacaaact

SEQ ID NO: 797 - DNA, 20 bp, synthetic construct
  source 1..20: mol_type = other DNA
tcactctgagcagatagttg

SEQ ID NO: 798 - DNA, 20 bp, synthetic construct
  source 1..20: mol_type = other DNA
cataaagcttcctcccgaac

SEQ ID NO: 799 - DNA, 20 bp, synthetic construct
  source 1..20: mol_type = other DNA
aggccgattcggcggatggt

SEQ ID NO: 800 - DNA, 20 bp, synthetic construct
  source 1..20: mol_type = other DNA
acagccacggacaaactcct

SEQ ID NO: 801 - DNA, 20 bp, synthetic construct
  source 1..20: mol_type = other DNA
atcatccaggctgcggaacc

SEQ ID NO: 802 - DNA, 20 bp, synthetic construct
  source 1..20: mol_type = other DNA
ctccgtgcggttccgctgga

SEQ ID NO: 803 - DNA, 20 bp, synthetic construct
  source 1..20: mol_type = other DNA
agcgagggcgacggtggcac

SEQ ID NO: 804 - DNA, 20 bp, synthetic construct
  source 1..20: mol_type = other DNA
cactctggtgcacggatgtt

SEQ ID NO: 805 - DNA, 20 bp, synthetic construct
  source 1..20: mol_type = other DNA
gcggacttagttacgctcct

SEQ ID NO: 806 - DNA, 20 bp, synthetic construct
  source 1..20: mol_type = other DNA
ggcaccaccgcagagtaatg

SEQ ID NO: 807 - DNA, 20 bp, synthetic construct
  source 1..20: mol_type = other DNA
ttgatcgccccattcgcagg

SEQ ID NO: 808 - DNA, 20 bp, synthetic construct
  source 1..20: mol_type = other DNA
ggagggctagaacatccctc

SEQ ID NO: 809 - DNA, 20 bp, synthetic construct
  source 1..20: mol_type = other DNA
aacctagtggtttcacagtg

SEQ ID NO: 810 - DNA, 20 bp, synthetic construct
  source 1..20: mol_type = other DNA
tcaactgcaaaccaagcggt

SEQ ID NO: 811 - DNA, 20 bp, synthetic construct
  source 1..20: mol_type = other DNA
cgtcctcctacaactcagag

SEQ ID NO: 812 - DNA, 20 bp, synthetic construct
  source 1..20: mol_type = other DNA
tcatcttaagtcaaacgaac

SEQ ID NO: 813 - DNA, 20 bp, synthetic construct
  source 1..20: mol_type = other DNA
agcttcccaggtttgcacgc

SEQ ID NO: 814 - DNA, 20 bp, synthetic construct
  source 1..20: mol_type = other DNA
tatcccctagaccatgctgt

SEQ ID NO: 815 - DNA, 20 bp, synthetic construct
  source 1..20: mol_type = other DNA
aggaactaatagctcaggcc

SEQ ID NO: 816 - DNA, 20 bp, synthetic construct
  source 1..20: mol_type = other DNA
ctttgaggtgtgagattggc

SEQ ID NO: 817 - DNA, 20 bp, synthetic construct
  source 1..20: mol_type = other DNA
aaatcgcagccaggctccaa

SEQ ID NO: 818 - DNA, 20 bp, synthetic construct
  source 1..20: mol_type = other DNA
gtgccgggaccccttggtct

SEQ ID NO: 819 - DNA, 20 bp, synthetic construct
  source 1..20: mol_type = other DNA
gcaccctctccgtctgtggc

SEQ ID NO: 820 - DNA, 20 bp, synthetic construct
  source 1..20: mol_type = other DNA
ctcttggatctccgtctcag

SEQ ID NO: 821 - DNA, 20 bp, synthetic construct
  source 1..20: mol_type = other DNA
aatcaccgcccacacaatgt

SEQ ID NO: 822 - DNA, 20 bp, synthetic construct
  source 1..20: mol_type = other DNA
ccttagccctgccgcctgat

SEQ ID NO: 823 - DNA, 20 bp, synthetic construct
  source 1..20: mol_type = other DNA
tattcttaggcccccagcac

SEQ ID NO: 824 - DNA, 20 bp, synthetic construct
  source 1..20: mol_type = other DNA
cacgccacacatttctaaca

SEQ ID NO: 825 - DNA, 20 bp, synthetic construct
  source 1..20: mol_type = other DNA
tccacgggatgcttcttttt

SEQ ID NO: 826 - DNA, 20 bp, synthetic construct
  source 1..20: mol_type = other DNA
gctgccttagccttacttct

SEQ ID NO: 827 - DNA, 20 bp, synthetic construct
  source 1..20: mol_type = other DNA
atggtcattgtagtttcagg

SEQ ID NO: 828 - DNA, 20 bp, synthetic construct
  source 1..20: mol_type = other DNA
agttggcatcgagagtagag

SEQ ID NO: 829 - DNA, 20 bp, synthetic construct
  source 1..20: mol_type = other DNA
caactcctagaattcctcgg

SEQ ID NO: 830 - DNA, 20 bp, synthetic construct
  source 1..20: mol_type = other DNA
ttgtctcaagggtacgctgt

SEQ ID NO: 831 - DNA, 20 bp, synthetic construct
  source 1..20: mol_type = other DNA
gccaaccatctaagtcctgg

SEQ ID NO: 832 - DNA, 20 bp, synthetic construct
  source 1..20: mol_type = other DNA
gcggcccactgcagcaatcc

SEQ ID NO: 833 - DNA, 20 bp, synthetic construct
  source 1..20: mol_type = other DNA
gagtgttgggaaaagaatcg

SEQ ID NO: 834 - DNA, 20 bp, synthetic construct
  source 1..20: mol_type = other DNA
gtcccaagagaaattggtgc

SEQ ID NO: 835 - DNA, 20 bp, synthetic construct
  source 1..20: mol_type = other DNA
ttaggatggtccaagttatg

SEQ ID NO: 836 - DNA, 20 bp, synthetic construct
  source 1..20: mol_type = other DNA
aagaccaatctacattagcc

SEQ ID NO: 837 - DNA, 20 bp, synthetic construct
  source 1..20: mol_type = other DNA
catatagagctaaccagtca

SEQ ID NO: 838 - DNA, 20 bp, synthetic construct
  source 1..20: mol_type = other DNA
taggttcacaagcacaagta

SEQ ID NO: 839 - DNA, 20 bp, synthetic construct
  source 1..20: mol_type = other DNA
cagacctagatggttaggct

SEQ ID NO: 840 - DNA, 20 bp, synthetic construct
  source 1..20: mol_type = other DNA
cccgctagccctggcctcaa

SEQ ID NO: 841 - DNA, 20 bp, synthetic construct
  source 1..20: mol_type = other DNA
tatactcccctcacggcccc

SEQ ID NO: 842 - DNA, 20 bp, synthetic construct
  source 1..20: mol_type = other DNA
cgagggctgctaaccaaagc

SEQ ID NO: 843 - DNA, 20 bp, synthetic construct
  source 1..20: mol_type = other DNA
tcgagtttgctgttcctcag

SEQ ID NO: 844 - DNA, 20 bp, synthetic construct
  source 1..20: mol_type = other DNA
cacaagtaaagctagcagtg

SEQ ID NO: 845 - DNA, 20 bp, synthetic construct
  source 1..20: mol_type = other DNA
caacctcagaggtttgcgat

SEQ ID NO: 846 - DNA, 20 bp, synthetic construct
  source 1..20: mol_type = other DNA
tgttaggcttctttagttag

SEQ ID NO: 847 - DNA, 20 bp, synthetic construct
  source 1..20: mol_type = other DNA
atcccttcataaagggctgc

SEQ ID NO: 848 - DNA, 20 bp, synthetic construct
  source 1..20: mol_type = other DNA
gcccaccctaagtgcctcgc

SEQ ID NO: 849 - DNA, 20 bp, synthetic construct
  source 1..20: mol_type = other DNA
aaagtggcccgataaaacta

SEQ ID NO: 850 - DNA, 20 bp, synthetic construct
  source 1..20: mol_type = other DNA
ggcccctagactcaatagaa

SEQ ID NO: 851 - DNA, 20 bp, synthetic construct
  source 1..20: mol_type = other DNA
ttagccaaaagcagttcacg

SEQ ID NO: 852 - DNA, 20 bp, synthetic construct
  source 1..20: mol_type = other DNA
ggcccgagaaactacaactc

SEQ ID NO: 853 - DNA, 20 bp, synthetic construct
  source 1..20: mol_type = other DNA
gtggattcccactagtacaa

SEQ ID NO: 854 - DNA, 20 bp, synthetic construct
  source 1..20: mol_type = other DNA
tttagctaagccctgagatc

SEQ ID NO: 855 - DNA, 20 bp, synthetic construct
  source 1..20: mol_type = other DNA
ctgactaggatgccatgacc

SEQ ID NO: 856 - DNA, 20 bp, synthetic construct
  source 1..20: mol_type = other DNA
aaagcacgcgctgtagcaga

SEQ ID NO: 857 - DNA, 20 bp, synthetic construct
  source 1..20: mol_type = other DNA
aggagacttggccacactcg

SEQ ID NO: 858 - DNA, 20 bp, synthetic construct
  source 1..20: mol_type = other DNA
gagcacacaacactacgcat

SEQ ID NO: 859 - DNA, 20 bp, synthetic construct
  source 1..20: mol_type = other DNA
gatcgggccaaggtccatca

SEQ ID NO: 860 - DNA, 20 bp, synthetic construct
  source 1..20: mol_type = other DNA
ttgctccaagatgcgggaaa

SEQ ID NO: 861 - DNA, 20 bp, synthetic construct
  source 1..20: mol_type = other DNA
tagcttccctcatcgcctac

SEQ ID NO: 862 - DNA, 20 bp, synthetic construct
  source 1..20: mol_type = other DNA
ggtcaagaatgtagatacct

SEQ ID NO: 863 - DNA, 20 bp, synthetic construct
  source 1..20: mol_type = other DNA
gcgatcggcctggttcattg

SEQ ID NO: 864 - DNA, 20 bp, synthetic construct
  source 1..20: mol_type = other DNA
cagtttctgagccatacccc

SEQ ID NO: 865 - DNA, 20 bp, synthetic construct
  source 1..20: mol_type = other DNA
agccctttagctcctggcta

SEQ ID NO: 866 - DNA, 20 bp, synthetic construct
  source 1..20: mol_type = other DNA
tgcagtgaaacctcgcagcc

SEQ ID NO: 867 - DNA, 20 bp, synthetic construct
  source 1..20: mol_type = other DNA
gtagctggtgcccgacggga

SEQ ID NO: 868 - DNA, 20 bp, synthetic construct
  source 1..20: mol_type = other DNA
gtttaaaggcatggctggcg

SEQ ID NO: 869 - DNA, 20 bp, synthetic construct
  source 1..20: mol_type = other DNA
gaagtagttgtcgccccatt

SEQ ID NO: 870 - DNA, 20 bp, synthetic construct
  source 1..20: mol_type = other DNA
cggcactccgatgttgcagg

SEQ ID NO: 871 - DNA, 20 bp, synthetic construct
  source 1..20: mol_type = other DNA
gtgaagatggttgctacagg

SEQ ID NO: 872 - DNA, 20 bp, synthetic construct
  source 1..20: mol_type = other DNA
cgcagtgggctgccgccctt

SEQ ID NO: 873 - DNA, 20 bp, synthetic construct
  source 1..20: mol_type = other DNA
taaaaatggccccgcacaaa

SEQ ID NO: 874 - DNA, 20 bp, synthetic construct
  source 1..20: mol_type = other DNA
tgtctgctcgctgccgttca

SEQ ID NO: 875 - DNA, 20 bp, synthetic construct
  source 1..20: mol_type = other DNA
tcataaagcttcctcccgaa

SEQ ID NO: 876 - DNA, 20 bp, synthetic construct
  source 1..20: mol_type = other DNA
gaggccgattcggcggatgg

SEQ ID NO: 877 - DNA, 20 bp, synthetic construct
  source 1..20: mol_type = other DNA
tgacagccacggacaaactc

SEQ ID NO: 878 - DNA, 20 bp, synthetic construct
  source 1..20: mol_type = other DNA
aatcatccaggctgcggaac

SEQ ID NO: 879 - DNA, 20 bp, synthetic construct
  source 1..20: mol_type = other DNA
gctccgtgcggttccgctgg

SEQ ID NO: 880 - DNA, 20 bp, synthetic construct
  source 1..20: mol_type = other DNA
cagcgagggcgacggtggca

SEQ ID NO: 881 - DNA, 20 bp, synthetic construct
  source 1..20: mol_type = other DNA
gccactctggtgcacggatg

SEQ ID NO: 882 - DNA, 20 bp, synthetic construct
  source 1..20: mol_type = other DNA
ttaggagcagcacccctctg

SEQ ID NO: 883 - DNA, 20 bp, synthetic construct
  source 1..20: mol_type = other DNA
tggcaccaccgcagagtaat

SEQ ID NO: 884 - DNA, 20 bp, synthetic construct
  source 1..20: mol_type = other DNA
cttgatcgccccattcgcag

SEQ ID NO: 885 - DNA, 20 bp, synthetic construct
  source 1..20: mol_type = other DNA
cggatggagggatcctccag

SEQ ID NO: 886 - DNA, 20 bp, synthetic construct
  source 1..20: mol_type = other DNA
gaacctagtggtttcacagt

SEQ ID NO: 887 - DNA, 20 bp, synthetic construct
  source 1..20: mol_type = other DNA
cggacacactccaatcacac

SEQ ID NO: 888 - DNA, 20 bp, synthetic construct
  source 1..20: mol_type = other DNA
ccgtcctcctacaactcaga

SEQ ID NO: 889 - DNA, 20 bp, synthetic construct
  source 1..20: mol_type = other DNA
ctttcatcttaagtcaaacg

SEQ ID NO: 890 - DNA, 20 bp, synthetic construct
  source 1..20: mol_type = other DNA
cagcttcccaggtttgcacg

SEQ ID NO: 891 - DNA, 20 bp, synthetic construct
  source 1..20: mol_type = other DNA
ttatcccctagaccatgctg

SEQ ID NO: 892 - DNA, 20 bp, synthetic construct
  source 1..20: mol_type = other DNA
taggaactaatagctcaggc

SEQ ID NO: 893 - DNA, 20 bp, synthetic construct
  source 1..20: mol_type = other DNA
gcaaagcaaccccccagacc

SEQ ID NO: 894 - DNA, 20 bp, synthetic construct
  source 1..20: mol_type = other DNA
ttaaatcgcagccaggctcc

SEQ ID NO: 895 - DNA, 20 bp, synthetic construct
  source 1..20: mol_type = other DNA
gcagtcctcctgggtctaag

SEQ ID NO: 896 - DNA, 20 bp, synthetic construct
  source 1..20: mol_type = other DNA
gtccaagcctgcctcgctct

SEQ ID NO: 897 - DNA, 20 bp, synthetic construct
  source 1..20: mol_type = other DNA
ggcctcttggatctccgtct

SEQ ID NO: 898 - DNA, 20 bp, synthetic construct
  source 1..20: mol_type = other DNA
caatcaccgcccacacaatg

SEQ ID NO: 899 - DNA, 20 bp, synthetic construct
  source 1..20: mol_type = other DNA
gtcccttagccctgccgcct

SEQ ID NO: 900 - DNA, 20 bp, synthetic construct
  source 1..20: mol_type = other DNA
ctattcttaggcccccagca

SEQ ID NO: 901 - DNA, 20 bp, synthetic construct
  source 1..20: mol_type = other DNA
ccacgccacacatttctaac

SEQ ID NO: 902 - DNA, 20 bp, synthetic construct
  source 1..20: mol_type = other DNA
cttccacgggatgcttcttt

SEQ ID NO: 903 - DNA, 20 bp, synthetic construct
  source 1..20: mol_type = other DNA
atagacttaagcctcagctc

SEQ ID NO: 904 - DNA, 20 bp, synthetic construct
  source 1..20: mol_type = other DNA
ggctgatggtcattgtagtt

SEQ ID NO: 905 - DNA, 20 bp, synthetic construct
  source 1..20: mol_type = other DNA
aagttggcatcgagagtaga

SEQ ID NO: 906 - DNA, 20 bp, synthetic construct
  source 1..20: mol_type = other DNA
acaactcctagaattcctcg

SEQ ID NO: 907 - DNA, 20 bp, synthetic construct
  source 1..20: mol_type = other DNA
cttgtctcaagggtacgctg

SEQ ID NO: 908 - DNA, 20 bp, synthetic construct
  source 1..20: mol_type = other DNA
ggccaaccatctaagtcctg

SEQ ID NO: 909 - DNA, 20 bp, synthetic construct
  source 1..20: mol_type = other DNA
agcggcccactgcagcaatc

SEQ ID NO: 910 - DNA, 20 bp, synthetic construct
  source 1..20: mol_type = other DNA
cgagtgttgggaaaagaatc

SEQ ID NO: 911 - DNA, 20 bp, synthetic construct
  source 1..20: mol_type = other DNA
agtccggttagaaggattgg

SEQ ID NO: 912 - DNA, 20 bp, synthetic construct
  source 1..20: mol_type = other DNA
gacttaggatggtccaagtt

SEQ ID NO: 913 - DNA, 20 bp, synthetic construct
  source 1..20: mol_type = other DNA
taagaccaatctacattagc

SEQ ID NO: 914 - DNA, 20 bp, synthetic construct
  source 1..20: mol_type = other DNA
gaacatatagagctaaccag

SEQ ID NO: 915 - DNA, 20 bp, synthetic construct
  source 1..20: mol_type = other DNA
ttaggttcacaagcacaagt

SEQ ID NO: 916 - DNA, 20 bp, synthetic construct
  source 1..20: mol_type = other DNA
ccagacctagatggttaggc

SEQ ID NO: 917 - DNA, 20 bp, synthetic construct
  source 1..20: mol_type = other DNA
agccctcacccgctagccct

SEQ ID NO: 918 - DNA, 20 bp, synthetic construct
  source 1..20: mol_type = other DNA
ctatactcccctcacggccc

SEQ ID NO: 919 - DNA, 20 bp, synthetic construct
  source 1..20: mol_type = other DNA
agcgagggctgctaaccaaa

SEQ ID NO: 920 - DNA, 20 bp, synthetic construct
  source 1..20: mol_type = other DNA
ttcgagtttgctgttcctca

SEQ ID NO: 921 - DNA, 20 bp, synthetic construct
  source 1..20: mol_type = other DNA
gcacacaagtaaagctagca

SEQ ID NO: 922 - DNA, 20 bp, synthetic construct
  source 1..20: mol_type = other DNA
tcaacctcagaggtttgcga

SEQ ID NO: 923 - DNA, 20 bp, synthetic construct
  source 1..20: mol_type = other DNA
gctgccatttactgttaggc

SEQ ID NO: 924 - DNA, 20 bp, synthetic construct
  source 1..20: mol_type = other DNA
gatcccttcataaagggctg

SEQ ID NO: 925 - DNA, 20 bp, synthetic construct
  source 1..20: mol_type = other DNA
agcccaccctaagtgcctcg

SEQ ID NO: 926 - DNA, 20 bp, synthetic construct
  source 1..20: mol_type = other DNA
taaagtggcccgataaaact

SEQ ID NO: 927 - DNA, 20 bp, synthetic construct
  source 1..20: mol_type = other DNA
gggcccctagactcaataga

SEQ ID NO: 928 - DNA, 20 bp, synthetic construct
  source 1..20: mol_type = other DNA
ggttagccaaaagcagttca

SEQ ID NO: 929 - DNA, 20 bp, synthetic construct
  source 1..20: mol_type = other DNA
gggcccgagaaactacaact

SEQ ID NO: 930 - DNA, 20 bp, synthetic construct
  source 1..20: mol_type = other DNA
tgtggattcccactagtaca

SEQ ID NO: 931 - DNA, 20 bp, synthetic construct
  source 1..20: mol_type = other DNA
atttagctaagccctgagat

SEQ ID NO: 932 - DNA, 20 bp, synthetic construct
  source 1..20: mol_type = other DNA
ctctgactaggatgccatga

SEQ ID NO: 933 - DNA, 20 bp, synthetic construct
  source 1..20: mol_type = other DNA
caaaagcacgcgctgtagca

SEQ ID NO: 934 - DNA, 20 bp, synthetic construct
  source 1..20: mol_type = other DNA
cgaggagacttggccacact

SEQ ID NO: 935 - DNA, 20 bp, synthetic construct
  source 1..20: mol_type = other DNA
tgtacagagcatctagtacg

SEQ ID NO: 936 - DNA, 20 bp, synthetic construct
  source 1..20: mol_type = other DNA
aggatcgggccaaggtccat

SEQ ID NO: 937 - DNA, 20 bp, synthetic construct
  source 1..20: mol_type = other DNA
cttgctccaagatgcgggaa

SEQ ID NO: 938 - DNA, 20 bp, synthetic construct
  source 1..20: mol_type = other DNA
ttagcttccctcatcgccta

SEQ ID NO: 939 - DNA, 20 bp, synthetic construct
  source 1..20: mol_type = other DNA
tacccggcctaggtatttcc

SEQ ID NO: 940 - DNA, 20 bp, synthetic construct
  source 1..20: mol_type = other DNA
cgcgatcggcctggttcatt

SEQ ID NO: 941 - DNA, 20 bp, synthetic construct
  source 1..20: mol_type = other DNA
acagtttctgagccataccc

SEQ ID NO: 942 - DNA, 20 bp, synthetic construct
  source 1..20: mol_type = other DNA
ggtgagctgaggacctcaca

SEQ ID NO: 943 - DNA, 20 bp, synthetic construct
  source 1..20: mol_type = other DNA
ctgcagtgaaacctcgcagc

SEQ ID NO: 944 - DNA, 20 bp, synthetic construct
  source 1..20: mol_type = other DNA
agtagctggtgcccgacggg

SEQ ID NO: 945 - DNA, 20 bp, synthetic construct
  source 1..20: mol_type = other DNA
ggtttaaaggcatggctggc

SEQ ID NO: 946 - DNA, 20 bp, synthetic construct
  source 1..20: mol_type = other DNA
ggaagtagttgtcgccccat

SEQ ID NO: 947 - DNA, 20 bp, synthetic construct
  source 1..20: mol_type = other DNA
acggcactccgatgttgcag

SEQ ID NO: 948 - DNA, 20 bp, synthetic construct
  source 1..20: mol_type = other DNA
ggtgaagatggttgctacag

SEQ ID NO: 949 - DNA, 20 bp, synthetic construct
  source 1..20: mol_type = other DNA
agcgcagtgggctgccgccc

SEQ ID NO: 950 - DNA, 20 bp, synthetic construct
  source 1..20: mol_type = other DNA
ataaaaatggccccgcacaa

SEQ ID NO: 951 - DNA, 20 bp, synthetic construct
  source 1..20: mol_type = other DNA
ctgtctgctcgctgccgttc

SEQ ID NO: 952 - DNA, 20 bp, synthetic construct
  source 1..20: mol_type = other DNA
ttcataaagcttcctcccga

SEQ ID NO: 953 - DNA, 20 bp, synthetic construct
  source 1..20: mol_type = other DNA
agaggccgattcggcggatg

SEQ ID NO: 954 - DNA, 20 bp, synthetic construct
  source 1..20: mol_type = other DNA
gtgacagccacggacaaact

SEQ ID NO: 955 - DNA, 20 bp, synthetic construct
  source 1..20: mol_type = other DNA
gaatcatccaggctgcggaa

SEQ ID NO: 956 - DNA, 20 bp, synthetic construct
  source 1..20: mol_type = other DNA
cgctccgtgcggttccgctg

SEQ ID NO: 957 - DNA, 20 bp, synthetic construct
  source 1..20: mol_type = other DNA
acagcgagggcgacggtggc

SEQ ID NO: 958 - DNA, 20 bp, synthetic construct
  source 1..20: mol_type = other DNA
ggccactctggtgcacggat

SEQ ID NO: 959 - DNA, 20 bp, synthetic construct
  source 1..20: mol_type = other DNA
tttaggagcagcacccctct

SEQ ID NO: 960 - DNA, 20 bp, synthetic construct
  source 1..20: mol_type = other DNA
ctggcaccaccgcagagtaa

SEQ ID NO: 961 - DNA, 20 bp, synthetic construct
  source 1..20: mol_type = other DNA
acttgatcgccccattcgca

SEQ ID NO: 962 - DNA, 20 bp, synthetic construct
  source 1..20: mol_type = other DNA
ccggatggagggatcctcca

SEQ ID NO: 963 - DNA, 20 bp, synthetic construct
  source 1..20: mol_type = other DNA
acctagaacctagtggtttc

SEQ ID NO: 964 - DNA, 20 bp, synthetic construct
  source 1..20: mol_type = other DNA
ccggacacactccaatcaca

SEQ ID NO: 965 - DNA, 20 bp, synthetic construct
  source 1..20: mol_type = other DNA
agccccgtcctcctacaact

SEQ ID NO: 966 - DNA, 20 bp, synthetic construct
  source 1..20: mol_type = other DNA
taggacccagaacccgggct

SEQ ID NO: 967 - DNA, 20 bp, synthetic construct
  source 1..20: mol_type = other DNA
ccggcagcttcccaggtttg

SEQ ID NO: 968 - DNA, 20 bp, synthetic construct
  source 1..20: mol_type = other DNA
agttttatcccctagaccat

SEQ ID NO: 969 - DNA, 20 bp, synthetic construct
  source 1..20: mol_type = other DNA
ctaggaactaatagctcagg

SEQ ID NO: 970 - DNA, 20 bp, synthetic construct
  source 1..20: mol_type = other DNA
gtgttcacgggccccctctc

SEQ ID NO: 971 - DNA, 20 bp, synthetic construct
  source 1..20: mol_type = other DNA
tttaaatcgcagccaggctc

SEQ ID NO: 972 - DNA, 20 bp, synthetic construct
  source 1..20: mol_type = other DNA
ggcagtcctcctgggtctaa

SEQ ID NO: 973 - DNA, 20 bp, synthetic construct
  source 1..20: mol_type = other DNA
tgtgtccaagcctgcctcgc

SEQ ID NO: 974 - DNA, 20 bp, synthetic construct
  source 1..20: mol_type = other DNA
tggcctcttggatctccgtc

SEQ ID NO: 975 - DNA, 20 bp, synthetic construct
  source 1..20: mol_type = other DNA
acaatcaccgcccacacaat

SEQ ID NO: 976 - DNA, 20 bp, synthetic construct
  source 1..20: mol_type = other DNA
gacctgaatggattccagac

SEQ ID NO: 977 - DNA, 20 bp, synthetic construct
  source 1..20: mol_type = other DNA
gctattcttaggcccccagc

SEQ ID NO: 978 - DNA, 20 bp, synthetic construct
  source 1..20: mol_type = other DNA
gccacgccacacatttctaa

SEQ ID NO: 979 - DNA, 20 bp, synthetic construct
  source 1..20: mol_type = other DNA
attccttccacgggatgctt

SEQ ID NO: 980 - DNA, 20 bp, synthetic construct
  source 1..20: mol_type = other DNA
tatagacttaagcctcagct

SEQ ID NO: 981 - DNA, 20 bp, synthetic construct
  source 1..20: mol_type = other DNA
gggctgatggtcattgtagt

SEQ ID NO: 982 - DNA, 20 bp, synthetic construct
  source 1..20: mol_type = other DNA
gaagttggcatcgagagtag

SEQ ID NO: 983 - DNA, 20 bp, synthetic construct
  source 1..20: mol_type = other DNA
atatcacactagagaactac

SEQ ID NO: 984 - DNA, 20 bp, synthetic construct
  source 1..20: mol_type = other DNA
ccttgtctcaagggtacgct

SEQ ID NO: 985 - DNA, 20 bp, synthetic construct
  source 1..20: mol_type = other DNA
tggccaaccatctaagtcct

SEQ ID NO: 986 - DNA, 20 bp, synthetic construct
  source 1..20: mol_type = other DNA
cagcggcccactgcagcaat

SEQ ID NO: 987 - DNA, 20 bp, synthetic construct
  source 1..20: mol_type = other DNA
ccacgagtgttgggaaaaga

SEQ ID NO: 988 - DNA, 20 bp, synthetic construct
  source 1..20: mol_type = other DNA
cagtccggttagaaggattg

SEQ ID NO: 989 - DNA, 20 bp, synthetic construct
  source 1..20: mol_type = other DNA
ggacttaggatggtccaagt

SEQ ID NO: 990 - DNA, 20 bp, synthetic construct
  source 1..20: mol_type = other DNA
tgcccagttctgacctaacc

SEQ ID NO: 991 - DNA, 20 bp, synthetic construct
  source 1..20: mol_type = other DNA
ggaacatatagagctaacca

SEQ ID NO: 992 - DNA, 20 bp, synthetic construct
  source 1..20: mol_type = other DNA
cttaggttcacaagcacaag

SEQ ID NO: 993 - DNA, 20 bp, synthetic construct
  source 1..20: mol_type = other DNA
cccagacctagatggttagg

SEQ ID NO: 994 - DNA, 20 bp, synthetic construct
  source 1..20: mol_type = other DNA
aaagccctcacccgctagcc

SEQ ID NO: 995 - DNA, 20 bp, synthetic construct
  source 1..20: mol_type = other DNA
tctatactcccctcacggcc

SEQ ID NO: 996 - DNA, 20 bp, synthetic construct
  source 1..20: mol_type = other DNA
gagcgagggctgctaaccaa

SEQ ID NO: 997 - DNA, 20 bp, synthetic construct
  source 1..20: mol_type = other DNA
cttcgagtttgctgttcctc

SEQ ID NO: 998 - DNA, 20 bp, synthetic construct
  source 1..20: mol_type = other DNA
ggcacacaagtaaagctagc

SEQ ID NO: 999 - DNA, 20 bp, synthetic construct
  source 1..20: mol_type = other DNA
atcaacctcagaggtttgcg

SEQ ID NO: 1000 - DNA, 20 bp, synthetic construct
  source 1..20: mol_type = other DNA
ttggccgtgtccctggagga

SEQ ID NO: 1001 - DNA, 20 bp, synthetic construct
  source 1..20: mol_type = other DNA
agatcccttcataaagggct

SEQ ID NO: 1002 - DNA, 20 bp, synthetic construct
  source 1..20: mol_type = other DNA
aacagcccaccctaagtgcc

SEQ ID NO: 1003 - DNA, 20 bp, synthetic construct
  source 1..20: mol_type = other DNA
ctaaagtggcccgataaaac

SEQ ID NO: 1004 - DNA, 20 bp, synthetic construct
  source 1..20: mol_type = other DNA
tgggcccctagactcaatag

SEQ ID NO: 1005 - DNA, 20 bp, synthetic construct
  source 1..20: mol_type = other DNA
ataggttagccaaaagcagt

SEQ ID NO: 1006 - DNA, 20 bp, synthetic construct
  source 1..20: mol_type = other DNA
ccactctactgagtctaggg

SEQ ID NO: 1007 - DNA, 20 bp, synthetic construct
  source 1..20: mol_type = other DNA
ttgtggattcccactagtac

SEQ ID NO: 1008 - DNA, 20 bp, synthetic construct
  source 1..20: mol_type = other DNA
ccttatttagctaagccctg

SEQ ID NO: 1009 - DNA, 20 bp, synthetic construct
  source 1..20: mol_type = other DNA
gctctgactaggatgccatg

SEQ ID NO: 1010 - DNA, 20 bp, synthetic construct
  source 1..20: mol_type = other DNA
acaaaagcacgcgctgtagc

SEQ ID NO: 1011 - DNA, 20 bp, synthetic construct
  source 1..20: mol_type = other DNA
acgaggagacttggccacac

SEQ ID NO: 1012 - DNA, 20 bp, synthetic construct
  source 1..20: mol_type = other DNA
ctgtgtacagagcatctagt

SEQ ID NO: 1013 - DNA, 20 bp, synthetic construct
  source 1..20: mol_type = other DNA
taggatcgggccaaggtcca

SEQ ID NO: 1014 - DNA, 20 bp, synthetic construct
  source 1..20: mol_type = other DNA
tcttgctccaagatgcggga

SEQ ID NO: 1015 - DNA, 20 bp, synthetic construct
  source 1..20: mol_type = other DNA
acttagcttccctcatcgcc

SEQ ID NO: 1016 - DNA, 20 bp, synthetic construct
  source 1..20: mol_type = other DNA
ctacccggcctaggtatttc

SEQ ID NO: 1017 - DNA, 20 bp, synthetic construct
  source 1..20: mol_type = other DNA
tcgcgatcggcctggttcat

SEQ ID NO: 1018 - DNA, 20 bp, synthetic construct
  source 1..20: mol_type = other DNA
gacagtttctgagccatacc

SEQ ID NO: 1019 - DNA, 20 bp, synthetic construct
  source 1..20: mol_type = other DNA
gggtgagctgaggacctcac

SEQ ID NO: 1020 - DNA, 20 bp, synthetic construct
  source 1..20: mol_type = other DNA
cctgcagtgaaacctcgcag

SEQ ID NO: 1021 - DNA, 20 bp, synthetic construct
  source 1..20: mol_type = other DNA
cgagtagctggtgcccgacg

SEQ ID NO: 1022 - DNA, 20 bp, synthetic construct
  source 1..20: mol_type = other DNA
cggtttaaaggcatggctgg

SEQ ID NO: 1023 - DNA, 20 bp, synthetic construct
  source 1..20: mol_type = other DNA
aggaagtagttgtcgcccca

SEQ ID NO: 1024 - DNA, 20 bp, synthetic construct
  source 1..20: mol_type = other DNA
cacggcactccgatgttgca

SEQ ID NO: 1025 - DNA, 20 bp, synthetic construct
  source 1..20: mol_type = other DNA
gtggtgaagatggttgctac

SEQ ID NO: 1026 - DNA, 20 bp, synthetic construct
  source 1..20: mol_type = other DNA
gagcgcagtgggctgccgcc

SEQ ID NO: 1027 - DNA, 20 bp, synthetic construct
  source 1..20: mol_type = other DNA
ccataaaaatggccccgcac

SEQ ID NO: 1028 - DNA, 20 bp, synthetic construct
  source 1..20: mol_type = other DNA
actgtctgctcgctgccgtt

SEQ ID NO: 1029 - DNA, 20 bp, synthetic construct
  source 1..20: mol_type = other DNA
attcataaagcttcctcccg

SEQ ID NO: 1030 - DNA, 20 bp, synthetic construct
  source 1..20: mol_type = other DNA
aagaggccgattcggcggat

SEQ ID NO: 1031 - DNA, 20 bp, synthetic construct
  source 1..20: mol_type = other DNA
ggtgacagccacggacaaac

SEQ ID NO: 1032 - DNA, 20 bp, synthetic construct
  source 1..20: mol_type = other DNA
aggaatcatccaggctgcgg

SEQ ID NO: 1033 - DNA, 20 bp, synthetic construct
  source 1..20: mol_type = other DNA
tccagaaggtcggagaggcg

SEQ ID NO: 1034 - DNA, 20 bp, synthetic construct
  source 1..20: mol_type = other DNA
tgacagcgagggcgacggtg

SEQ ID NO: 1035 - DNA, 20 bp, synthetic construct
  source 1..20: mol_type = other DNA
cggccactctggtgcacgga

SEQ ID NO: 1036 - DNA, 20 bp, synthetic construct
  source 1..20: mol_type = other DNA
gtttaggagcagcacccctc

SEQ ID NO: 1037 - DNA, 20 bp, synthetic construct
  source 1..20: mol_type = other DNA
aacctctggcaccaccgcag

SEQ ID NO: 1038 - DNA, 20 bp, synthetic construct
  source 1..20: mol_type = other DNA
ggacttgatcgccccattcg

SEQ ID NO: 1039 - DNA, 20 bp, synthetic construct
  source 1..20: mol_type = other DNA
agccggatggagggatcctc

SEQ ID NO: 1040 - DNA, 20 bp, synthetic construct
  source 1..20: mol_type = other DNA
gacctagaacctagtggttt

SEQ ID NO: 1041 - DNA, 20 bp, synthetic construct
  source 1..20: mol_type = other DNA
ctccggacacactccaatca

SEQ ID NO: 1042 - DNA, 20 bp, synthetic construct
  source 1..20: mol_type = other DNA
tagccccgtcctcctacaac

SEQ ID NO: 1043 - DNA, 20 bp, synthetic construct
  source 1..20: mol_type = other DNA
ctaggacccagaacccgggc

SEQ ID NO: 1044 - DNA, 20 bp, synthetic construct
  source 1..20: mol_type = other DNA
aaaccccggcagcttcccag

SEQ ID NO: 1045 - DNA, 20 bp, synthetic construct
  source 1..20: mol_type = other DNA
gagttttatcccctagacca

SEQ ID NO: 1046 - DNA, 20 bp, synthetic construct
  source 1..20: mol_type = other DNA
ctcctaggaactaatagctc

SEQ ID NO: 1047 - DNA, 20 bp, synthetic construct
  source 1..20: mol_type = other DNA
ggtgttcacgggccccctct

SEQ ID NO: 1048 - DNA, 20 bp, synthetic construct
  source 1..20: mol_type = other DNA
gtttaaatcgcagccaggct

SEQ ID NO: 1049 - DNA, 20 bp, synthetic construct
  source 1..20: mol_type = other DNA
agcccatagtttggagtagg

SEQ ID NO: 1050 - DNA, 20 bp, synthetic construct
  source 1..20: mol_type = other DNA
tatcacgcctccttcctgtg

SEQ ID NO: 1051 - DNA, 20 bp, synthetic construct
  source 1..20: mol_type = other DNA
gctgtctttcgatcttgctc

SEQ ID NO: 1052 - DNA, 20 bp, synthetic construct
  source 1..20: mol_type = other DNA
gacaatcaccgcccacacaa

SEQ ID NO: 1053 - DNA, 20 bp, synthetic construct
  source 1..20: mol_type = other DNA
cggacctgaatggattccag

SEQ ID NO: 1054 - DNA, 20 bp, synthetic construct
  source 1..20: mol_type = other DNA
ggctattcttaggcccccag

SEQ ID NO: 1055 - DNA, 20 bp, synthetic construct
  source 1..20: mol_type = other DNA
ggccacgccacacatttcta

SEQ ID NO: 1056 - DNA, 20 bp, synthetic construct
  source 1..20: mol_type = other DNA
taattccttccacgggatgc

SEQ ID NO: 1057 - DNA, 20 bp, synthetic construct
  source 1..20: mol_type = other DNA
tctatagacttaagcctcag

SEQ ID NO: 1058 - DNA, 20 bp, synthetic construct
  source 1..20: mol_type = other DNA
gaccctatgactcccagaat

SEQ ID NO: 1059 - DNA, 20 bp, synthetic construct
  source 1..20: mol_type = other DNA
tgaagttggcatcgagagta

SEQ ID NO: 1060 - DNA, 20 bp, synthetic construct
  source 1..20: mol_type = other DNA
gcaatatcacactagagaac

SEQ ID NO: 1061 - DNA, 20 bp, synthetic construct
  source 1..20: mol_type = other DNA
cccttgtctcaagggtacgc

SEQ ID NO: 1062 - DNA, 20 bp, synthetic construct
  source 1..20: mol_type = other DNA
ttggccaaccatctaagtcc

SEQ ID NO: 1063 - DNA, 20 bp, synthetic construct
  source 1..20: mol_type = other DNA
acagagtgggcagcggccca

SEQ ID NO: 1064 - DNA, 20 bp, synthetic construct
  source 1..20: mol_type = other DNA
tccacgagtgttgggaaaag

SEQ ID NO: 1065 - DNA, 20 bp, synthetic construct
  source 1..20: mol_type = other DNA
gcagtccggttagaaggatt

SEQ ID NO: 1066 - DNA, 20 bp, synthetic construct
  source 1..20: mol_type = other DNA
taggacttaggatggtccaa

SEQ ID NO: 1067 - DNA, 20 bp, synthetic construct
  source 1..20: mol_type = other DNA
atgcccagttctgacctaac

SEQ ID NO: 1068 - DNA, 20 bp, synthetic construct
  source 1..20: mol_type = other DNA
tggaacatatagagctaacc

SEQ ID NO: 1069 - DNA, 20 bp, synthetic construct
  source 1..20: mol_type = other DNA
gcttaggttcacaagcacaa

SEQ ID NO: 1070 - DNA, 20 bp, synthetic construct
  source 1..20: mol_type = other DNA
ccccagacctagatggttag

SEQ ID NO: 1071 - DNA, 20 bp, synthetic construct
  source 1..20: mol_type = other DNA
caaagccctcacccgctagc

SEQ ID NO: 1072 - DNA, 20 bp, synthetic construct
  source 1..20: mol_type = other DNA
ctctatactcccctcacggc

SEQ ID NO: 1073 - DNA, 20 bp, synthetic construct
  source 1..20: mol_type = other DNA
ggagcgagggctgctaacca

SEQ ID NO: 1074 - DNA, 20 bp, synthetic construct
  source 1..20: mol_type = other DNA
cgtctcaatcatgcctcggg

SEQ ID NO: 1075 - DNA, 20 bp, synthetic construct
  source 1..20: mol_type = other DNA
cttaggcacacaagtaaagc

SEQ ID NO: 1076 - DNA, 20 bp, synthetic construct
  source 1..20: mol_type = other DNA
cgtgcctgacatcagctgtg

SEQ ID NO: 1077 - DNA, 20 bp, synthetic construct
  source 1..20: mol_type = other DNA
gttggccgtgtccctggagg

SEQ ID NO: 1078 - DNA, 20 bp, synthetic construct
  source 1..20: mol_type = other DNA
tagatcccttcataaagggc

SEQ ID NO: 1079 - DNA, 20 bp, synthetic construct
  source 1..20: mol_type = other DNA
gctcattgaccccagaatcc

SEQ ID NO: 1080 - DNA, 20 bp, synthetic construct
  source 1..20: mol_type = other DNA
cctaaagtggcccgataaaa

SEQ ID NO: 1081 - DNA, 20 bp, synthetic construct
  source 1..20: mol_type = other DNA
ttgggcccctagactcaata

SEQ ID NO: 1082 - DNA, 20 bp, synthetic construct
  source 1..20: mol_type = other DNA
tataggttagccaaaagcag

SEQ ID NO: 1083 - DNA, 20 bp, synthetic construct
  source 1..20: mol_type = other DNA
accactctactgagtctagg

SEQ ID NO: 1084 - DNA, 20 bp, synthetic construct
  source 1..20: mol_type = other DNA
gttgtggattcccactagta

SEQ ID NO: 1085 - DNA, 20 bp, synthetic construct
  source 1..20: mol_type = other DNA
gccttatttagctaagccct

SEQ ID NO: 1086 - DNA, 20 bp, synthetic construct
  source 1..20: mol_type = other DNA
agctctgactaggatgccat

SEQ ID NO: 1087 - DNA, 20 bp, synthetic construct
  source 1..20: mol_type = other DNA
cacaaaagcacgcgctgtag

SEQ ID NO: 1088 - DNA, 20 bp, synthetic construct
  source 1..20: mol_type = other DNA
tacgaggagacttggccaca

SEQ ID NO: 1089 - DNA, 20 bp, synthetic construct
  source 1..20: mol_type = other DNA
ccctgtgtacagagcatcta

SEQ ID NO: 1090 - DNA, 20 bp, synthetic construct
  source 1..20: mol_type = other DNA
gtaggatcgggccaaggtcc

SEQ ID NO: 1091 - DNA, 20 bp, synthetic construct
  source 1..20: mol_type = other DNA
ctcttgctccaagatgcggg

SEQ ID NO: 1092 - DNA, 20 bp, synthetic construct
  source 1..20: mol_type = other DNA
cacttagcttccctcatcgc

SEQ ID NO: 1093 - DNA, 20 bp, synthetic construct
  source 1..20: mol_type = other DNA
cctacccggcctaggtattt

SEQ ID NO: 1094 - DNA, 20 bp, synthetic construct
  source 1..20: mol_type = other DNA
atcgcgatcggcctggttca

SEQ ID NO: 1095 - DNA, 20 bp, synthetic construct
  source 1..20: mol_type = other DNA
ccccttatgtagataagcag

SEQ ID NO: 1096 - DNA, 20 bp, synthetic construct
  source 1..20: mol_type = other DNA
ggtgcaaaccagggtgagct

SEQ ID NO: 1097 - DNA, 20 bp, synthetic construct
  source 1..20: mol_type = other DNA
ccctgcagtgaaacctcgca

SEQ ID NO: 1098 - DNA, 20 bp, synthetic construct
  source 1..20: mol_type = other DNA
aatgcaccaggtagggtgcg

SEQ ID NO: 1099 - DNA, 20 bp, synthetic construct
  source 1..20: mol_type = other DNA
gcggtttaaaggcatggctg

SEQ ID NO: 1100 - DNA, 20 bp, synthetic construct
  source 1..20: mol_type = other DNA
ccaggaagtagttgtcgccc

SEQ ID NO: 1101 - DNA, 20 bp, synthetic construct
  source 1..20: mol_type = other DNA
accacggcactccgatgttg

SEQ ID NO: 1102 - DNA, 20 bp, synthetic construct
  source 1..20: mol_type = other DNA
caccggcacacaggtagcgc

SEQ ID NO: 1103 - DNA, 20 bp, synthetic construct
  source 1..20: mol_type = other DNA
gtgagcgcagtgggctgccg

SEQ ID NO: 1104 - DNA, 20 bp, synthetic construct
  source 1..20: mol_type = other DNA
gtcttgtccaagttgaagtc

SEQ ID NO: 1105 - DNA, 20 bp, synthetic construct
  source 1..20: mol_type = other DNA
cactgtctgctcgctgccgt

SEQ ID NO: 1106 - DNA, 20 bp, synthetic construct
  source 1..20: mol_type = other DNA
ggattcataaagcttcctcc

SEQ ID NO: 1107 - DNA, 20 bp, synthetic construct
  source 1..20: mol_type = other DNA
tgaagaggccgattcggcgg

SEQ ID NO: 1108 - DNA, 20 bp, synthetic construct
  source 1..20: mol_type = other DNA
ccaaggtgacagccacggac

SEQ ID NO: 1109 - DNA, 20 bp, synthetic construct
  source 1..20: mol_type = other DNA
caggaatcatccaggctgcg

SEQ ID NO: 1110 - DNA, 20 bp, synthetic construct
  source 1..20: mol_type = other DNA
atttccagtccagaaggtcg

SEQ ID NO: 1111 - DNA, 20 bp, synthetic construct
  source 1..20: mol_type = other DNA
gtgacagcgagggcgacggt

SEQ ID NO: 1112 - DNA, 20 bp, synthetic construct
  source 1..20: mol_type = other DNA
cgcggccactctggtgcacg

SEQ ID NO: 1113 - DNA, 20 bp, synthetic construct
  source 1..20: mol_type = other DNA
ggtttaggagcagcacccct

SEQ ID NO: 1114 - DNA, 20 bp, synthetic construct
  source 1..20: mol_type = other DNA
aaacctctggcaccaccgca

SEQ ID NO: 1115 - DNA, 20 bp, synthetic construct
  source 1..20: mol_type = other DNA
tggacttgatcgccccattc

SEQ ID NO: 1116 - DNA, 20 bp, synthetic construct
  source 1..20: mol_type = other DNA
gagccggatggagggatcct

SEQ ID NO: 1117 - DNA, 20 bp, synthetic construct
  source 1..20: mol_type = other DNA
ggacctagaacctagtggtt

SEQ ID NO: 1118 - DNA, 20 bp, synthetic construct
  source 1..20: mol_type = other DNA
tctccggacacactccaatc

SEQ ID NO: 1119 - DNA, 20 bp, synthetic construct
  source 1..20: mol_type = other DNA
gtagccccgtcctcctacaa

SEQ ID NO: 1120 - DNA, 20 bp, synthetic construct
  source 1..20: mol_type = other DNA
ccctaggacccagaacccgg

SEQ ID NO: 1121 - DNA, 20 bp, synthetic construct
  source 1..20: mol_type = other DNA
gaaaccccggcagcttccca

SEQ ID NO: 1122 - DNA, 20 bp, synthetic construct
  source 1..20: mol_type = other DNA
ggagttttatcccctagacc

SEQ ID NO: 1123 - DNA, 20 bp, synthetic construct
  source 1..20: mol_type = other DNA
actcctaggaactaatagct

SEQ ID NO: 1124 - DNA, 20 bp, synthetic construct
  source 1..20: mol_type = other DNA
acccggctgggtgttcacgg

SEQ ID NO: 1125 - DNA, 20 bp, synthetic construct
  source 1..20: mol_type = other DNA
ggtttaaatcgcagccaggc

SEQ ID NO: 1126 - DNA, 20 bp, synthetic construct
  source 1..20: mol_type = other DNA
gagcccatagtttggagtag

SEQ ID NO: 1127 - DNA, 20 bp, synthetic construct
  source 1..20: mol_type = other DNA
gtcctatcacgcctccttcc

SEQ ID NO: 1128 - DNA, 20 bp, synthetic construct
  source 1..20: mol_type = other DNA
ggctgtctttcgatcttgct

SEQ ID NO: 1129 - DNA, 20 bp, synthetic construct
  source 1..20: mol_type = other DNA
tgacaatcaccgcccacaca

SEQ ID NO: 1130 - DNA, 20 bp, synthetic construct
  source 1..20: mol_type = other DNA
tcggacctgaatggattcca

SEQ ID NO: 1131 - DNA, 20 bp, synthetic construct
  source 1..20: mol_type = other DNA
agcctcgctctgaggtccct

SEQ ID NO: 1132 - DNA, 20 bp, synthetic construct
  source 1..20: mol_type = other DNA
cggccacgccacacatttct

SEQ ID NO: 1133 - DNA, 20 bp, synthetic construct
  source 1..20: mol_type = other DNA
ctaattccttccacgggatg

SEQ ID NO: 1134 - DNA, 20 bp, synthetic construct
  source 1..20: mol_type = other DNA
gtctatagacttaagcctca

SEQ ID NO: 1135 - DNA, 20 bp, synthetic construct
  source 1..20: mol_type = other DNA
ggaccctatgactcccagaa

SEQ ID NO: 1136 - DNA, 20 bp, synthetic construct
  source 1..20: mol_type = other DNA
atgaagttggcatcgagagt

SEQ ID NO: 1137 - DNA, 20 bp, synthetic construct
  source 1..20: mol_type = other DNA
ccagcaatatcacactagag

SEQ ID NO: 1138 - DNA, 20 bp, synthetic construct
  source 1..20: mol_type = other DNA
ccccttgtctcaagggtacg

SEQ ID NO: 1139 - DNA, 20 bp, synthetic construct
  source 1..20: mol_type = other DNA
tttggccaaccatctaagtc

SEQ ID NO: 1140 - DNA, 20 bp, synthetic construct
  source 1..20: mol_type = other DNA
cactactgcacagagtgggc

SEQ ID NO: 1141 - DNA, 20 bp, synthetic construct
  source 1..20: mol_type = other DNA
ctccacgagtgttgggaaaa

SEQ ID NO: 1142 - DNA, 20 bp, synthetic construct
  source 1..20: mol_type = other DNA
agcagtccggttagaaggat

SEQ ID NO: 1143 - DNA, 20 bp, synthetic construct
  source 1..20: mol_type = other DNA
ttaggacttaggatggtcca

SEQ ID NO: 1144 - DNA, 20 bp, synthetic construct
  source 1..20: mol_type = other DNA
gaatgcccagttctgaccta

SEQ ID NO: 1145 - DNA, 20 bp, synthetic construct
  source 1..20: mol_type = other DNA
agttctggaacatatagagc

SEQ ID NO: 1146 - DNA, 20 bp, synthetic construct
  source 1..20: mol_type = other DNA
tattacttgcttaggttcac

SEQ ID NO: 1147 - DNA, 20 bp, synthetic construct
  source 1..20: mol_type = other DNA
cccccagacctagatggtta

SEQ ID NO: 1148 - DNA, 20 bp, synthetic construct
  source 1..20: mol_type = other DNA
ccaaagccctcacccgctag

SEQ ID NO: 1149 - DNA, 20 bp, synthetic construct
  source 1..20: mol_type = other DNA
tctctatactcccctcacgg

SEQ ID NO: 1150 - DNA, 20 bp, synthetic construct
  source 1..20: mol_type = other DNA
ccggagcgagggctgctaac

SEQ ID NO: 1151 - DNA, 20 bp, synthetic construct
  source 1..20: mol_type = other DNA
ccatgggactccccaccgcg

SEQ ID NO: 1152 - DNA, 20 bp, synthetic construct
  source 1..20: mol_type = other DNA
gaccacttaggcacacaagt

SEQ ID NO: 1153 - DNA, 20 bp, synthetic construct
  source 1..20: mol_type = other DNA
ctggaaggcttaggacccac

SEQ ID NO: 1154 - DNA, 20 bp, synthetic construct
  source 1..20: mol_type = other DNA
tgttggccgtgtccctggag

SEQ ID NO: 1155 - DNA, 20 bp, synthetic construct
  source 1..20: mol_type = other DNA
atagatcccttcataaaggg

SEQ ID NO: 1156 - DNA, 20 bp, synthetic construct
  source 1..20: mol_type = other DNA
tagtgtgggatctggctctg

SEQ ID NO: 1157 - DNA, 20 bp, synthetic construct
  source 1..20: mol_type = other DNA
ccctaaagtggcccgataaa

SEQ ID NO: 1158 - DNA, 20 bp, synthetic construct
  source 1..20: mol_type = other DNA
tttgggcccctagactcaat

SEQ ID NO: 1159 - DNA, 20 bp, synthetic construct
  source 1..20: mol_type = other DNA
attataggttagccaaaagc

SEQ ID NO: 1160 - DNA, 20 bp, synthetic construct
  source 1..20: mol_type = other DNA
caccactctactgagtctag

SEQ ID NO: 1161 - DNA, 20 bp, synthetic construct
  source 1..20: mol_type = other DNA
gagttgtggattcccactag

SEQ ID NO: 1162 - DNA, 20 bp, synthetic construct
  source 1..20: mol_type = other DNA
tgccttatttagctaagccc

SEQ ID NO: 1163 - DNA, 20 bp, synthetic construct
  source 1..20: mol_type = other DNA
tagctctgactaggatgcca

SEQ ID NO: 1164 - DNA, 20 bp, synthetic construct
  source 1..20: mol_type = other DNA
tcacaaaagcacgcgctgta

SEQ ID NO: 1165 - DNA, 20 bp, synthetic construct
  source 1..20: mol_type = other DNA
ttacgaggagacttggccac

SEQ ID NO: 1166 - DNA, 20 bp, synthetic construct
  source 1..20: mol_type = other DNA
gtctctcattattagtatcc

SEQ ID NO: 1167 - DNA, 20 bp, synthetic construct
  source 1..20: mol_type = other DNA
tgtaggatcgggccaaggtc

SEQ ID NO: 1168 - DNA, 20 bp, synthetic construct
  source 1..20: mol_type = other DNA
gctcttgctccaagatgcgg

SEQ ID NO: 1169 - DNA, 20 bp, synthetic construct
  source 1..20: mol_type = other DNA
ccacttagcttccctcatcg

SEQ ID NO: 1170 - DNA, 20 bp, synthetic construct
  source 1..20: mol_type = other DNA
tcctacccggcctaggtatt

SEQ ID NO: 1171 - DNA, 20 bp, synthetic construct
  source 1..20: mol_type = other DNA
catcgcgatcggcctggttc

SEQ ID NO: 1172 - DNA, 20 bp, synthetic construct
  source 1..20: mol_type = other DNA
accccttatgtagataagca

SEQ ID NO: 1173 - DNA, 20 bp, synthetic construct
  source 1..20: mol_type = other DNA
cgatgtgggtgcaaaccagg

SEQ ID NO: 1174 - DNA, 20 bp, synthetic construct
  source 1..20: mol_type = other DNA
gcccctgcagtgaaacctcg

SEQ ID NO: 1175 - DNA, 20 bp, synthetic construct
  source 1..20: mol_type = other DNA
gaatgcaccaggtagggtgc

SEQ ID NO: 1176 - DNA, 20 bp, synthetic construct
  source 1..20: mol_type = other DNA
gtgcggtttaaaggcatggc

SEQ ID NO: 1177 - DNA, 20 bp, synthetic construct
  source 1..20: mol_type = other DNA
accaggaagtagttgtcgcc

SEQ ID NO: 1178 - DNA, 20 bp, synthetic construct
  source 1..20: mol_type = other DNA
taccacggcactccgatgtt

SEQ ID NO: 1179 - DNA, 20 bp, synthetic construct
  source 1..20: mol_type = other DNA
gcaccggcacacaggtagcg

SEQ ID NO: 1180 - DNA, 20 bp, synthetic construct
  source 1..20: mol_type = other DNA
cgtgagcgcagtgggctgcc

SEQ ID NO: 1181 - DNA, 20 bp, synthetic construct
  source 1..20: mol_type = other DNA
ataaggtcttgtccaagttg

SEQ ID NO: 1182 - DNA, 20 bp, synthetic construct
  source 1..20: mol_type = other DNA
aaccactgtctgctcgctgc

SEQ ID NO: 1183 - DNA, 20 bp, synthetic construct
  source 1..20: mol_type = other DNA
ccagtaaggattcataaagc

SEQ ID NO: 1184 - DNA, 20 bp, synthetic construct
  source 1..20: mol_type = other DNA
ttgaagaggccgattcggcg

SEQ ID NO: 1185 - DNA, 20 bp, synthetic construct
  source 1..20: mol_type = other DNA
tccaaggtgacagccacgga

SEQ ID NO: 1186 - DNA, 20 bp, synthetic construct
  source 1..20: mol_type = other DNA
gcgagcaggaatcatccagg

SEQ ID NO: 1187 - DNA, 20 bp, synthetic construct
  source 1..20: mol_type = other DNA
cggcctaggtatttccagtc

SEQ ID NO: 1188 - DNA, 20 bp, synthetic construct
  source 1..20: mol_type = other DNA
ctccagcggcccgttccggg

SEQ ID NO: 1189 - DNA, 20 bp, synthetic construct
  source 1..20: mol_type = other DNA
gcgcggccactctggtgcac

SEQ ID NO: 1190 - DNA, 20 bp, synthetic construct
  source 1..20: mol_type = other DNA
cagtgcagatctggagcggg

SEQ ID NO: 1191 - DNA, 20 bp, synthetic construct
  source 1..20: mol_type = other DNA
aaaacctctggcaccaccgc

SEQ ID NO: 1192 - DNA, 20 bp, synthetic construct
  source 1..20: mol_type = other DNA
ctggacttgatcgccccatt

SEQ ID NO: 1193 - DNA, 20 bp, synthetic construct
  source 1..20: mol_type = other DNA
aggagccggatggagggatc

SEQ ID NO: 1194 - DNA, 20 bp, synthetic construct
  source 1..20: mol_type = other DNA
ggtaaggttccagatctaga

SEQ ID NO: 1195 - DNA, 20 bp, synthetic construct
  source 1..20: mol_type = other DNA
atctccggacacactccaat

SEQ ID NO: 1196 - DNA, 20 bp, synthetic construct
  source 1..20: mol_type = other DNA
agtagccccgtcctcctaca

SEQ ID NO: 1197 - DNA, 20 bp, synthetic construct
  source 1..20: mol_type = other DNA
tccctaggacccagaacccg

SEQ ID NO: 1198 - DNA, 20 bp, synthetic construct
  source 1..20: mol_type = other DNA
gtctgaaaccccggcagctt

SEQ ID NO: 1199 - DNA, 20 bp, synthetic construct
  source 1..20: mol_type = other DNA
tggagttttatcccctagac

SEQ ID NO: 1200 - DNA, 20 bp, synthetic construct
  source 1..20: mol_type = other DNA
tactcctaggaactaatagc

SEQ ID NO: 1201 - DNA, 20 bp, synthetic construct
  source 1..20: mol_type = other DNA
tacccggctgggtgttcacg

SEQ ID NO: 1202 - DNA, 20 bp, synthetic construct
  source 1..20: mol_type = other DNA
gggtttaaatcgcagccagg

SEQ ID NO: 1203 - DNA, 20 bp, synthetic construct
  source 1..20: mol_type = other DNA
ggagcccatagtttggagta

SEQ ID NO: 1204 - DNA, 20 bp, synthetic construct
  source 1..20: mol_type = other DNA
tgtcctatcacgcctccttc

SEQ ID NO: 1205 - DNA, 20 bp, synthetic construct
  source 1..20: mol_type = other DNA
aggctgtctttcgatcttgc

SEQ ID NO: 1206 - DNA, 20 bp, synthetic construct
  source 1..20: mol_type = other DNA
atgacaatcaccgcccacac

SEQ ID NO: 1207 - DNA, 20 bp, synthetic construct
  source 1..20: mol_type = other DNA
gtcggacctgaatggattcc

SEQ ID NO: 1208 - DNA, 20 bp, synthetic construct
  source 1..20: mol_type = other DNA
cgacctggctttttgctgcc

SEQ ID NO: 1209 - DNA, 20 bp, synthetic construct
  source 1..20: mol_type = other DNA
tcggccacgccacacatttc

SEQ ID NO: 1210 - DNA, 20 bp, synthetic construct
  source 1..20: mol_type = other DNA
gctaattccttccacgggat

SEQ ID NO: 1211 - DNA, 20 bp, synthetic construct
  source 1..20: mol_type = other DNA
tgtctatagacttaagcctc

SEQ ID NO: 1212 - DNA, 20 bp, synthetic construct
  source 1..20: mol_type = other DNA
aggaccctatgactcccaga

SEQ ID NO: 1213 - DNA, 20 bp, synthetic construct
  source 1..20: mol_type = other DNA
taaatgaagttggcatcgag

SEQ ID NO: 1214 - DNA, 20 bp, synthetic construct
  source 1..20: mol_type = other DNA
gtccagcaatatcacactag

SEQ ID NO: 1215 - DNA, 20 bp, synthetic construct
  source 1..20: mol_type = other DNA
accccttgtctcaagggtac

SEQ ID NO: 1216 - DNA, 20 bp, synthetic construct
  source 1..20: mol_type = other DNA
tttttggccaaccatctaag

SEQ ID NO: 1217 - DNA, 20 bp, synthetic construct
  source 1..20: mol_type = other DNA
ccactactgcacagagtggg

SEQ ID NO: 1218 - DNA, 20 bp, synthetic construct
  source 1..20: mol_type = other DNA
tctccacgagtgttgggaaa

SEQ ID NO: 1219 - DNA, 20 bp, synthetic construct
  source 1..20: mol_type = other DNA
cagcagtccggttagaagga

SEQ ID NO: 1220 - DNA, 20 bp, synthetic construct
  source 1..20: mol_type = other DNA
gcttaggacttaggatggtc

SEQ ID NO: 1221 - DNA, 20 bp, synthetic construct
  source 1..20: mol_type = other DNA
gaacggatactaagggctgg

SEQ ID NO: 1222 - DNA, 20 bp, synthetic construct
  source 1..20: mol_type = other DNA
ctagggcaaagttctggaac

SEQ ID NO: 1223 - DNA, 20 bp, synthetic construct
  source 1..20: mol_type = other DNA
cctaatattacttgcttagg

SEQ ID NO: 1224 - DNA, 20 bp, synthetic construct
  source 1..20: mol_type = other DNA
tcccccagacctagatggtt

SEQ ID NO: 1225 - DNA, 20 bp, synthetic construct
  source 1..20: mol_type = other DNA
cggtaaagcccaaagccctc

SEQ ID NO: 1226 - DNA, 20 bp, synthetic construct
  source 1..20: mol_type = other DNA
gtctctatactcccctcacg

SEQ ID NO: 1227 - DNA, 20 bp, synthetic construct
  source 1..20: mol_type = other DNA
gtgagtatctctgctaatga

SEQ ID NO: 1228 - DNA, 20 bp, synthetic construct
  source 1..20: mol_type = other DNA
cccatgggactccccaccgc

SEQ ID NO: 1229 - DNA, 20 bp, synthetic construct
  source 1..20: mol_type = other DNA
ccctggaaggcttaggaccc

SEQ ID NO: 1230 - DNA, 20 bp, synthetic construct
  source 1..20: mol_type = other DNA
gtgttggccgtgtccctgga

SEQ ID NO: 1231 - DNA, 20 bp, synthetic construct
  source 1..20: mol_type = other DNA
gacctcagaatagatccctt

SEQ ID NO: 1232 - DNA, 20 bp, synthetic construct
  source 1..20: mol_type = other DNA
ctagtgtgggatctggctct

SEQ ID NO: 1233 - DNA, 20 bp, synthetic construct
  source 1..20: mol_type = other DNA
tccctaaagtggcccgataa

SEQ ID NO: 1234 - DNA, 20 bp, synthetic construct
  source 1..20: mol_type = other DNA
ttttgggcccctagactcaa

SEQ ID NO: 1235 - DNA, 20 bp, synthetic construct
  source 1..20: mol_type = other DNA
ttggaaattataggttagcc

SEQ ID NO: 1236 - DNA, 20 bp, synthetic construct
  source 1..20: mol_type = other DNA
taccaccactctactgagtc

SEQ ID NO: 1237 - DNA, 20 bp, synthetic construct
  source 1..20: mol_type = other DNA
ggagttgtggattcccacta

SEQ ID NO: 1238 - DNA, 20 bp, synthetic construct
  source 1..20: mol_type = other DNA
gtgccttatttagctaagcc

SEQ ID NO: 1239 - DNA, 20 bp, synthetic construct
  source 1..20: mol_type = other DNA
ctagctctgactaggatgcc

SEQ ID NO: 1240 - DNA, 20 bp, synthetic construct
  source 1..20: mol_type = other DNA
atcacaaaagcacgcgctgt

SEQ ID NO: 1241 - DNA, 20 bp, synthetic construct
  source 1..20: mol_type = other DNA
cttacgaggagacttggcca

SEQ ID NO: 1242 - DNA, 20 bp, synthetic construct
  source 1..20: mol_type = other DNA
ggtctctcattattagtatc

SEQ ID NO: 1243 - DNA, 20 bp, synthetic construct
  source 1..20: mol_type = other DNA
ctgtaggatcgggccaaggt

SEQ ID NO: 1244 - DNA, 20 bp, synthetic construct
  source 1..20: mol_type = other DNA
tgctcttgctccaagatgcg

SEQ ID NO: 1245 - DNA, 20 bp, synthetic construct
  source 1..20: mol_type = other DNA
gacccacttagcttccctca

SEQ ID NO: 1246 - DNA, 20 bp, synthetic construct
  source 1..20: mol_type = other DNA
gtcctacccggcctaggtat

SEQ ID NO: 1247 - DNA, 20 bp, synthetic construct
  source 1..20: mol_type = other DNA
ccatcgcgatcggcctggtt

SEQ ID NO: 1248 - DNA, 20 bp, synthetic construct
  source 1..20: mol_type = other DNA
caccccttatgtagataagc

SEQ ID NO: 1249 - DNA, 20 bp, synthetic construct
  source 1..20: mol_type = other DNA
gcgatgtgggtgcaaaccag

SEQ ID NO: 1250 - DNA, 20 bp, synthetic construct
  source 1..20: mol_type = other DNA
cgcccctgcagtgaaacctc

SEQ ID NO: 1251 - DNA, 20 bp, synthetic construct
  source 1..20: mol_type = other DNA
ggaatgcaccaggtagggtg

SEQ ID NO: 1252 - DNA, 20 bp, synthetic construct
  source 1..20: mol_type = other DNA
agtgcggtttaaaggcatgg

SEQ ID NO: 1253 - DNA, 20 bp, synthetic construct
  source 1..20: mol_type = other DNA
ccaccaggaagtagttgtcg

SEQ ID NO: 1254 - DNA, 20 bp, synthetic construct
  source 1..20: mol_type = other DNA
gtaccacggcactccgatgt

SEQ ID NO: 1255 - DNA, 20 bp, synthetic construct
  source 1..20: mol_type = other DNA
cggcaccggcacacaggtag

SEQ ID NO: 1256 - DNA, 20 bp, synthetic construct
  source 1..20: mol_type = other DNA
cggtgatctgggacacagta

SEQ ID NO: 1257 - DNA, 20 bp, synthetic construct
  source 1..20: mol_type = other DNA
gaagtataaggtcttgtcca

SEQ ID NO: 1258 - DNA, 20 bp, synthetic construct
  source 1..20: mol_type = other DNA
caaccactgtctgctcgctg

SEQ ID NO: 1259 - DNA, 20 bp, synthetic construct
  source 1..20: mol_type = other DNA
ttcatgtcgggaaggctccc

SEQ ID NO: 1260 - DNA, 20 bp, synthetic construct
  source 1..20: mol_type = other DNA
attgaagaggccgattcggc

SEQ ID NO: 1261 - DNA, 20 bp, synthetic construct
  source 1..20: mol_type = other DNA
ccaaggctcatagtaggagg

SEQ ID NO: 1262 - DNA, 20 bp, synthetic construct
  source 1..20: mol_type = other DNA
ctgcgagcaggaatcatcca

SEQ ID NO: 1263 - DNA, 20 bp, synthetic construct
  source 1..20: mol_type = other DNA
ccggcctaggtatttccagt

SEQ ID NO: 1264 - DNA, 20 bp, synthetic construct
  source 1..20: mol_type = other DNA
tcctccagcggcccgttccg

SEQ ID NO: 1265 - DNA, 20 bp, synthetic construct
  source 1..20: mol_type = other DNA
ggcgcggccactctggtgca

SEQ ID NO: 1266 - DNA, 20 bp, synthetic construct
  source 1..20: mol_type = other DNA
ccagtgcagatctggagcgg

SEQ ID NO: 1267 - DNA, 20 bp, synthetic construct
  source 1..20: mol_type = other DNA
taaaacctctggcaccaccg

SEQ ID NO: 1268 - DNA, 20 bp, synthetic construct
  source 1..20: mol_type = other DNA
tctggacttgatcgccccat

SEQ ID NO: 1269 - DNA, 20 bp, synthetic construct
  source 1..20: mol_type = other DNA
atgacaggagccggatggag

SEQ ID NO: 1270 - DNA, 20 bp, synthetic construct
  source 1..20: mol_type = other DNA
tggtaaggttccagatctag

SEQ ID NO: 1271 - DNA, 20 bp, synthetic construct
  source 1..20: mol_type = other DNA
catctccggacacactccaa

SEQ ID NO: 1272 - DNA, 20 bp, synthetic construct
  source 1..20: mol_type = other DNA
tagtagccccgtcctcctac

SEQ ID NO: 1273 - DNA, 20 bp, synthetic construct
  source 1..20: mol_type = other DNA
ctaggagtctcattttagcg

SEQ ID NO: 1274 - DNA, 20 bp, synthetic construct
  source 1..20: mol_type = other DNA
ggtctgaaaccccggcagct

SEQ ID NO: 1275 - DNA, 20 bp, synthetic construct
  source 1..20: mol_type = other DNA
tctggagttttatcccctag

SEQ ID NO: 1276 - DNA, 20 bp, synthetic construct
  source 1..20: mol_type = other DNA
ctactcctaggaactaatag

SEQ ID NO: 1277 - DNA, 20 bp, synthetic construct
  source 1..20: mol_type = other DNA
atacccggctgggtgttcac

SEQ ID NO: 1278 - DNA, 20 bp, synthetic construct
  source 1..20: mol_type = other DNA
aggagctgggtttaaatcgc

SEQ ID NO: 1279 - DNA, 20 bp, synthetic construct
  source 1..20: mol_type = other DNA
tgggagcccatagtttggag

SEQ ID NO: 1280 - DNA, 20 bp, synthetic construct
  source 1..20: mol_type = other DNA
gtgtcctatcacgcctcctt

SEQ ID NO: 1281 - DNA, 20 bp, synthetic construct
  source 1..20: mol_type = other DNA
caggctgtctttcgatcttg

SEQ ID NO: 1282 - DNA, 20 bp, synthetic construct
  source 1..20: mol_type = other DNA
aatgacaatcaccgcccaca

SEQ ID NO: 1283 - DNA, 20 bp, synthetic construct
  source 1..20: mol_type = other DNA
agtcggacctgaatggattc

SEQ ID NO: 1284 - DNA, 20 bp, synthetic construct
  source 1..20: mol_type = other DNA
ccgacctggctttttgctgc

SEQ ID NO: 1285 - DNA, 20 bp, synthetic construct
  source 1..20: mol_type = other DNA
ctcggccacgccacacattt

SEQ ID NO: 1286 - DNA, 20 bp, synthetic construct
  source 1..20: mol_type = other DNA
atgctaattccttccacggg

SEQ ID NO: 1287 - DNA, 20 bp, synthetic construct
  source 1..20: mol_type = other DNA
atgtctatagacttaagcct

SEQ ID NO: 1288 - DNA, 20 bp, synthetic construct
  source 1..20: mol_type = other DNA
ttaaaggaccctatgactcc

SEQ ID NO: 1289 - DNA, 20 bp, synthetic construct
  source 1..20: mol_type = other DNA
gtaaatgaagttggcatcga

SEQ ID NO: 1290 - DNA, 20 bp, synthetic construct
  source 1..20: mol_type = other DNA
gggattcatgagcatccagg

SEQ ID NO: 1291 - DNA, 20 bp, synthetic construct
  source 1..20: mol_type = other DNA
gaccccttgtctcaagggta

SEQ ID NO: 1292 - DNA, 20 bp, synthetic construct
  source 1..20: mol_type = other DNA
gattttttggccaaccatct

SEQ ID NO: 1293 - DNA, 20 bp, synthetic construct
  source 1..20: mol_type = other DNA
accactactgcacagagtgg

SEQ ID NO: 1294 - DNA, 20 bp, synthetic construct
  source 1..20: mol_type = other DNA
actgtctccacgagtgttgg

SEQ ID NO: 1295 - DNA, 20 bp, synthetic construct
  source 1..20: mol_type = other DNA
acagcagtccggttagaagg

SEQ ID NO: 1296 - DNA, 20 bp, synthetic construct
  source 1..20: mol_type = other DNA
agcttaggacttaggatggt

SEQ ID NO: 1297 - DNA, 20 bp, synthetic construct
  source 1..20: mol_type = other DNA
agaacggatactaagggctg

SEQ ID NO: 1298 - DNA, 20 bp, synthetic construct
  source 1..20: mol_type = other DNA
aactacaacccccatcagcg

SEQ ID NO: 1299 - DNA, 20 bp, synthetic construct
  source 1..20: mol_type = other DNA
gtgacacacctaccctgact

SEQ ID NO: 1300 - DNA, 20 bp, synthetic construct
  source 1..20: mol_type = other DNA
gaatacccaggtgccccctc

SEQ ID NO: 1301 - DNA, 20 bp, synthetic construct
  source 1..20: mol_type = other DNA
acggtaaagcccaaagccct

SEQ ID NO: 1302 - DNA, 20 bp, synthetic construct
  source 1..20: mol_type = other DNA
ggtctctatactcccctcac

SEQ ID NO: 1303 - DNA, 20 bp, synthetic construct
  source 1..20: mol_type = other DNA
cgtctacaggattttctaga

SEQ ID NO: 1304 - DNA, 20 bp, synthetic construct
  source 1..20: mol_type = other DNA
tatgagacatgtcactccag

SEQ ID NO: 1305 - DNA, 20 bp, synthetic construct
  source 1..20: mol_type = other DNA
aaaggaccacttaggcacac

SEQ ID NO: 1306 - DNA, 20 bp, synthetic construct
  source 1..20: mol_type = other DNA
gccctggaaggcttaggacc

SEQ ID NO: 1307 - DNA, 20 bp, synthetic construct
  source 1..20: mol_type = other DNA
cgtgttggccgtgtccctgg

SEQ ID NO: 1308 - DNA, 20 bp, synthetic construct
  source 1..20: mol_type = other DNA
gtggacctcagaatagatcc

SEQ ID NO: 1309 - DNA, 20 bp, synthetic construct
  source 1..20: mol_type = other DNA
gctagtgtgggatctggctc

SEQ ID NO: 1310 - DNA, 20 bp, synthetic construct
  source 1..20: mol_type = other DNA
gtccctaaagtggcccgata

SEQ ID NO: 1311 - DNA, 20 bp, synthetic construct
  source 1..20: mol_type = other DNA
tttttgggcccctagactca

SEQ ID NO: 1312 - DNA, 20 bp, synthetic construct
  source 1..20: mol_type = other DNA
ggactattggaaattatagg

SEQ ID NO: 1313 - DNA, 20 bp, synthetic construct
  source 1..20: mol_type = other DNA
cttaccaccactctactgag

SEQ ID NO: 1314 - DNA, 20 bp, synthetic construct
  source 1..20: mol_type = other DNA
aggagttgtggattcccact

SEQ ID NO: 1315 - DNA, 20 bp, synthetic construct
  source 1..20: mol_type = other DNA
agtgccttatttagctaagc

SEQ ID NO: 1316 - DNA, 20 bp, synthetic construct
  source 1..20: mol_type = other DNA
gctagctctgactaggatgc

SEQ ID NO: 1317 - DNA, 20 bp, synthetic construct
  source 1..20: mol_type = other DNA
tatcacaaaagcacgcgctg

SEQ ID NO: 1318 - DNA, 20 bp, synthetic construct
  source 1..20: mol_type = other DNA
tcttacgaggagacttggcc

SEQ ID NO: 1319 - DNA, 20 bp, synthetic construct
  source 1..20: mol_type = other DNA
gggtaagataaggtctctca

SEQ ID NO: 1320 - DNA, 20 bp, synthetic construct
  source 1..20: mol_type = other DNA
cctgtaggatcgggccaagg

SEQ ID NO: 1321 - DNA, 20 bp, synthetic construct
  source 1..20: mol_type = other DNA
cgtcgctgagcccccacaac

SEQ ID NO: 1322 - DNA, 20 bp, synthetic construct
  source 1..20: mol_type = other DNA
gagacccacttagcttccct

SEQ ID NO: 1323 - DNA, 20 bp, synthetic construct
  source 1..20: mol_type = other DNA
ggtcctacccggcctaggta

SEQ ID NO: 1324 - DNA, 20 bp, synthetic construct
  source 1..20: mol_type = other DNA
accatcgcgatcggcctggt

SEQ ID NO: 1325 - DNA, 20 bp, synthetic construct
  source 1..20: mol_type = other DNA
ccaccccttatgtagataag

SEQ ID NO: 1326 - DNA, 20 bp, synthetic construct
  source 1..20: mol_type = other DNA
ggcgatgtgggtgcaaacca

SEQ ID NO: 1327 - DNA, 20 bp, synthetic construct
  source 1..20: mol_type = other DNA
ctaggcagaaggaggccgca

SEQ ID NO: 1328 - DNA, 20 bp, synthetic construct
  source 1..20: mol_type = other DNA
ctagggaatgcaccaggtag

SEQ ID NO: 1329 - DNA, 20 bp, synthetic construct
  source 1..20: mol_type = other DNA
aagtgcggtttaaaggcatg

SEQ ID NO: 1330 - DNA, 20 bp, synthetic construct
  source 1..20: mol_type = other DNA
ggccccaccaggaagtagtt

SEQ ID NO: 1331 - DNA, 20 bp, synthetic construct
  source 1..20: mol_type = other DNA
caaccactcatggaagtgag

SEQ ID NO: 1332 - DNA, 20 bp, synthetic construct
  source 1..20: mol_type = other DNA
acggcaccggcacacaggta

SEQ ID NO: 1333 - DNA, 20 bp, synthetic construct
  source 1..20: mol_type = other DNA
gcggtgatctgggacacagt

SEQ ID NO: 1334 - DNA, 20 bp, synthetic construct
  source 1..20: mol_type = other DNA
ccggcgataaagaagtataa

SEQ ID NO: 1335 - DNA, 20 bp, synthetic construct
  source 1..20: mol_type = other DNA
aggcaaccactgtctgctcg

SEQ ID NO: 1336 - DNA, 20 bp, synthetic construct
  source 1..20: mol_type = other DNA
gttcatgtcgggaaggctcc

SEQ ID NO: 1337 - DNA, 20 bp, synthetic construct
  source 1..20: mol_type = other DNA
tattgaagaggccgattcgg

SEQ ID NO: 1338 - DNA, 20 bp, synthetic construct
  source 1..20: mol_type = other DNA
cccaaggctcatagtaggag

SEQ ID NO: 1339 - DNA, 20 bp, synthetic construct
  source 1..20: mol_type = other DNA
agctgcgagcaggaatcatc

SEQ ID NO: 1340 - DNA, 20 bp, synthetic construct
  source 1..20: mol_type = other DNA
ggcgcgcagacatatagtac

SEQ ID NO: 1341 - DNA, 20 bp, synthetic construct
  source 1..20: mol_type = other DNA
ttcctccagcggcccgttcc

SEQ ID NO: 1342 - DNA, 20 bp, synthetic construct
  source 1..20: mol_type = other DNA
tcggcgcggccactctggtg

SEQ ID NO: 1343 - DNA, 20 bp, synthetic construct
  source 1..20: mol_type = other DNA
agtgtttggcggactgggtg

SEQ ID NO: 1344 - DNA, 20 bp, synthetic construct
  source 1..20: mol_type = other DNA
gaatttgtaagccacacggg

SEQ ID NO: 1345 - DNA, 20 bp, synthetic construct
  source 1..20: mol_type = other DNA
ctctggacttgatcgcccca

SEQ ID NO: 1346 - DNA, 20 bp, synthetic construct
  source 1..20: mol_type = other DNA
gatgacaggagccggatgga

SEQ ID NO: 1347 - DNA, 20 bp, synthetic construct
  source 1..20: mol_type = other DNA
gtggtaaggttccagatcta

SEQ ID NO: 1348 - DNA, 20 bp, synthetic construct
  source 1..20: mol_type = other DNA
tctcatctccggacacactc

SEQ ID NO: 1349 - DNA, 20 bp, synthetic construct
  source 1..20: mol_type = other DNA
ctagtagccccgtcctccta

SEQ ID NO: 1350 - DNA, 20 bp, synthetic construct
  source 1..20: mol_type = other DNA
agtctctcggaagcctgcct

SEQ ID NO: 1351 - DNA, 20 bp, synthetic construct
  source 1..20: mol_type = other DNA
aggtctgaaaccccggcagc

SEQ ID NO: 1352 - DNA, 20 bp, synthetic construct
  source 1..20: mol_type = other DNA
ccgctcaggcctcctatctc

SEQ ID NO: 1353 - DNA, 20 bp, synthetic construct
  source 1..20: mol_type = other DNA
cgcatgtgtcccaggccatg

SEQ ID NO: 1354 - DNA, 20 bp, synthetic construct
  source 1..20: mol_type = other DNA
gatacccggctgggtgttca

SEQ ID NO: 1355 - DNA, 20 bp, synthetic construct
  source 1..20: mol_type = other DNA
gttcccgagttcccagctca

SEQ ID NO: 1356 - DNA, 20 bp, synthetic construct
  source 1..20: mol_type = other DNA
ctgggagcccatagtttgga

SEQ ID NO: 1357 - DNA, 20 bp, synthetic construct
  source 1..20: mol_type = other DNA
ggtgtcctatcacgcctcct

SEQ ID NO: 1358 - DNA, 20 bp, synthetic construct
  source 1..20: mol_type = other DNA
accaggctgtctttcgatct

SEQ ID NO: 1359 - DNA, 20 bp, synthetic construct
  source 1..20: mol_type = other DNA
caatgacaatcaccgcccac

SEQ ID NO: 1360 - DNA, 20 bp, synthetic construct
  source 1..20: mol_type = other DNA
cagtcggacctgaatggatt

SEQ ID NO: 1361 - DNA, 20 bp, synthetic construct
  source 1..20: mol_type = other DNA
gccgacctggctttttgctg

SEQ ID NO: 1362 - DNA, 20 bp, synthetic construct
  source 1..20: mol_type = other DNA
cctcggccacgccacacatt

SEQ ID NO: 1363 - DNA, 20 bp, synthetic construct
  source 1..20: mol_type = other DNA
gatgctaattccttccacgg

SEQ ID NO: 1364 - DNA, 20 bp, synthetic construct
  source 1..20: mol_type = other DNA
gatgtctatagacttaagcc

SEQ ID NO: 1365 - DNA, 20 bp, synthetic construct
  source 1..20: mol_type = other DNA
attaaaggaccctatgactc

SEQ ID NO: 1366 - DNA, 20 bp, synthetic construct
  source 1..20: mol_type = other DNA
agtaaatgaagttggcatcg

SEQ ID NO: 1367 - DNA, 20 bp, synthetic construct
  source 1..20: mol_type = other DNA
gggtcaaaaccaggtcaggc

SEQ ID NO: 1368 - DNA, 20 bp, synthetic construct
  source 1..20: mol_type = other DNA
agaccccttgtctcaagggt

SEQ ID NO: 1369 - DNA, 20 bp, synthetic construct
  source 1..20: mol_type = other DNA
ggattttttggccaaccatc

SEQ ID NO: 1370 - DNA, 20 bp, synthetic construct
  source 1..20: mol_type = other DNA
caccactactgcacagagtg

SEQ ID NO: 1371 - DNA, 20 bp, synthetic construct
  source 1..20: mol_type = other DNA
cactgtctccacgagtgttg

SEQ ID NO: 1372 - DNA, 20 bp, synthetic construct
  source 1..20: mol_type = other DNA
gacagcagtccggttagaag

SEQ ID NO: 1373 - DNA, 20 bp, synthetic construct
  source 1..20: mol_type = other DNA
cagcttaggacttaggatgg

SEQ ID NO: 1374 - DNA, 20 bp, synthetic construct
  source 1..20: mol_type = other DNA
gagaacggatactaagggct

SEQ ID NO: 1375 - DNA, 20 bp, synthetic construct
  source 1..20: mol_type = other DNA
cgaaaaactacaacccccat

SEQ ID NO: 1376 - DNA, 20 bp, synthetic construct
  source 1..20: mol_type = other DNA
tggtgacacacctaccctga

SEQ ID NO: 1377 - DNA, 20 bp, synthetic construct
  source 1..20: mol_type = other DNA
cgaatacccaggtgccccct

SEQ ID NO: 1378 - DNA, 20 bp, synthetic construct
  source 1..20: mol_type = other DNA
cacggtaaagcccaaagccc

SEQ ID NO: 1379 - DNA, 20 bp, synthetic construct
  source 1..20: mol_type = other DNA
ataggacagtccccacctgg

SEQ ID NO: 1380 - DNA, 20 bp, synthetic construct
  source 1..20: mol_type = other DNA
tccgtctacaggattttcta

SEQ ID NO: 1381 - DNA, 20 bp, synthetic construct
  source 1..20: mol_type = other DNA
ctatgagacatgtcactcca

SEQ ID NO: 1382 - DNA, 20 bp, synthetic construct
  source 1..20: mol_type = other DNA
ggcaatgctaagccccattt

SEQ ID NO: 1383 - DNA, 20 bp, synthetic construct
  source 1..20: mol_type = other DNA
ggtttctaggatagcaagga

SEQ ID NO: 1384 - DNA, 20 bp, synthetic construct
  source 1..20: mol_type = other DNA
accgtgttggccgtgtccct

SEQ ID NO: 1385 - DNA, 20 bp, synthetic construct
  source 1..20: mol_type = other DNA
tgtggacctcagaatagatc

SEQ ID NO: 1386 - DNA, 20 bp, synthetic construct
  source 1..20: mol_type = other DNA
tgtgtccgcctcgctctgtt

SEQ ID NO: 1387 - DNA, 20 bp, synthetic construct
  source 1..20: mol_type = other DNA
cgtccctaaagtggcccgat

SEQ ID NO: 1388 - DNA, 20 bp, synthetic construct
  source 1..20: mol_type = other DNA
ttttttgggcccctagactc

SEQ ID NO: 1389 - DNA, 20 bp, synthetic construct
  source 1..20: mol_type = other DNA
gggactattggaaattatag

SEQ ID NO: 1390 - DNA, 20 bp, synthetic construct
  source 1..20: mol_type = other DNA
agcaactgttccatcatagc

SEQ ID NO: 1391 - DNA, 20 bp, synthetic construct
  source 1..20: mol_type = other DNA
ccaggagttgtggattccca

SEQ ID NO: 1392 - DNA, 20 bp, synthetic construct
  source 1..20: mol_type = other DNA
actcagcccaagtgccttat

SEQ ID NO: 1393 - DNA, 20 bp, synthetic construct
  source 1..20: mol_type = other DNA
tgctagctctgactaggatg

SEQ ID NO: 1394 - DNA, 20 bp, synthetic construct
  source 1..20: mol_type = other DNA
gtatcacaaaagcacgcgct

SEQ ID NO: 1395 - DNA, 20 bp, synthetic construct
  source 1..20: mol_type = other DNA
gtcttacgaggagacttggc

SEQ ID NO: 1396 - DNA, 20 bp, synthetic construct
  source 1..20: mol_type = other DNA
gacttagtctattttgatgg

SEQ ID NO: 1397 - DNA, 20 bp, synthetic construct
  source 1..20: mol_type = other DNA
acctgtaggatcgggccaag

SEQ ID NO: 1398 - DNA, 20 bp, synthetic construct
  source 1..20: mol_type = other DNA
cgcctgtaccaagtgccagg

SEQ ID NO: 1399 - DNA, 20 bp, synthetic construct
  source 1..20: mol_type = other DNA
gagagacccacttagcttcc

SEQ ID NO: 1400 - DNA, 20 bp, synthetic construct
  source 1..20: mol_type = other DNA
gatttgccaggagaggatag

SEQ ID NO: 1401 - DNA, 20 bp, synthetic construct
  source 1..20: mol_type = other DNA
caccatcgcgatcggcctgg

SEQ ID NO: 1402 - DNA, 20 bp, synthetic construct
  source 1..20: mol_type = other DNA
tccaccccttatgtagataa

SEQ ID NO: 1403 - DNA, 20 bp, synthetic construct
  source 1..20: mol_type = other DNA
cggcgatgtgggtgcaaacc

SEQ ID NO: 1404 - DNA, 20 bp, synthetic construct
  source 1..20: mol_type = other DNA
cctaggcagaaggaggccgc

SEQ ID NO: 1405 - DNA, 20 bp, synthetic construct
  source 1..20: mol_type = other DNA
tctagggaatgcaccaggta

SEQ ID NO: 1406 - DNA, 20 bp, synthetic construct
  source 1..20: mol_type = other DNA
gacaaagtgcggtttaaagg

SEQ ID NO: 1407 - DNA, 20 bp, synthetic construct
  source 1..20: mol_type = other DNA
acggccccaccaggaagtag

SEQ ID NO: 1408 - DNA, 20 bp, synthetic construct
  source 1..20: mol_type = other DNA
ccaaccactcatggaagtga

SEQ ID NO: 1409 - DNA, 20 bp, synthetic construct
  source 1..20: mol_type = other DNA
tccacggcaccggcacacag

SEQ ID NO: 1410 - DNA, 20 bp, synthetic construct
  source 1..20: mol_type = other DNA
tggcggtgatctgggacaca

SEQ ID NO: 1411 - DNA, 20 bp, synthetic construct
  source 1..20: mol_type = other DNA
ggccggcgataaagaagtat

SEQ ID NO: 1412 - DNA, 20 bp, synthetic construct
  source 1..20: mol_type = other DNA
cgctggcatgatgaagaagg

SEQ ID NO: 1413 - DNA, 20 bp, synthetic construct
  source 1..20: mol_type = other DNA
tgttcatgtcgggaaggctc

SEQ ID NO: 1414 - DNA, 20 bp, synthetic construct
  source 1..20: mol_type = other DNA
ctattgaagaggccgattcg

SEQ ID NO: 1415 - DNA, 20 bp, synthetic construct
  source 1..20: mol_type = other DNA
tgtagccccaaggctcatag

SEQ ID NO: 1416 - DNA, 20 bp, synthetic construct
  source 1..20: mol_type = other DNA
gagctgcgagcaggaatcat

SEQ ID NO: 1417 - DNA, 20 bp, synthetic construct
  source 1..20: mol_type = other DNA
tggcgcgcagacatatagta

SEQ ID NO: 1418 - DNA, 20 bp, synthetic construct
  source 1..20: mol_type = other DNA
cttcctccagcggcccgttc

SEQ ID NO: 1419 - DNA, 20 bp, synthetic construct
  source 1..20: mol_type = other DNA
ctcggcgcggccactctggt

SEQ ID NO: 1420 - DNA, 20 bp, synthetic construct
  source 1..20: mol_type = other DNA
gagtgtttggcggactgggt

SEQ ID NO: 1421 - DNA, 20 bp, synthetic construct
  source 1..20: mol_type = other DNA
agaatttgtaagccacacgg

SEQ ID NO: 1422 - DNA, 20 bp, synthetic construct
  source 1..20: mol_type = other DNA
cggctctggacttgatcgcc

SEQ ID NO: 1423 - DNA, 20 bp, synthetic construct
  source 1..20: mol_type = other DNA
gggatgacaggagccggatg

SEQ ID NO: 1424 - DNA, 20 bp, synthetic construct
  source 1..20: mol_type = other DNA
gggatcagtatgcagtaacg

SEQ ID NO: 1425 - DNA, 20 bp, synthetic construct
  source 1..20: mol_type = other DNA
cctagtagccccgtcctcct

SEQ ID NO: 1426 - DNA, 20 bp, synthetic construct
  source 1..20: mol_type = other DNA
gtatctagtctctcggaagc

SEQ ID NO: 1427 - DNA, 20 bp, synthetic construct
  source 1..20: mol_type = other DNA
taggtctgaaaccccggcag

SEQ ID NO: 1428 - DNA, 20 bp, synthetic construct
  source 1..20: mol_type = other DNA
gccgctcaggcctcctatct

SEQ ID NO: 1429 - DNA, 20 bp, synthetic construct
  source 1..20: mol_type = other DNA
cgatacccggctgggtgttc

SEQ ID NO: 1430 - DNA, 20 bp, synthetic construct
  source 1..20: mol_type = other DNA
actcaggttcccgagttccc

SEQ ID NO: 1431 - DNA, 20 bp, synthetic construct
  source 1..20: mol_type = other DNA
actgggagcccatagtttgg

SEQ ID NO: 1432 - DNA, 20 bp, synthetic construct
  source 1..20: mol_type = other DNA
gggtgtcctatcacgcctcc

SEQ ID NO: 1433 - DNA, 20 bp, synthetic construct
  source 1..20: mol_type = other DNA
acaatgacaatcaccgccca

SEQ ID NO: 1434 - DNA, 20 bp, synthetic construct
  source 1..20: mol_type = other DNA
acagtcggacctgaatggat

SEQ ID NO: 1435 - DNA, 20 bp, synthetic construct
  source 1..20: mol_type = other DNA
cgccgacctggctttttgct

SEQ ID NO: 1436 - DNA, 20 bp, synthetic construct
  source 1..20: mol_type = other DNA
ccctcggccacgccacacat

SEQ ID NO: 1437 - DNA, 20 bp, synthetic construct
  source 1..20: mol_type = other DNA
tgatgctaattccttccacg

SEQ ID NO: 1438 - DNA, 20 bp, synthetic construct
  source 1..20: mol_type = other DNA
agatgtctatagacttaagc

SEQ ID NO: 1439 - DNA, 20 bp, synthetic construct
  source 1..20: mol_type = other DNA
gattaaaggaccctatgact

SEQ ID NO: 1440 - DNA, 20 bp, synthetic construct
  source 1..20: mol_type = other DNA
ctagagtaaatgaagttggc

SEQ ID NO: 1441 - DNA, 20 bp, synthetic construct
  source 1..20: mol_type = other DNA
gcagccagttcctcaattat

SEQ ID NO: 1442 - DNA, 20 bp, synthetic construct
  source 1..20: mol_type = other DNA
aagaccccttgtctcaaggg

SEQ ID NO: 1443 - DNA, 20 bp, synthetic construct
  source 1..20: mol_type = other DNA
gaggattttttggccaacca

SEQ ID NO: 1444 - DNA, 20 bp, synthetic construct
  source 1..20: mol_type = other DNA
gtcaatctgtcaccactact

SEQ ID NO: 1445 - DNA, 20 bp, synthetic construct
  source 1..20: mol_type = other DNA
ccactgtctccacgagtgtt

SEQ ID NO: 1446 - DNA, 20 bp, synthetic construct
  source 1..20: mol_type = other DNA
gggacagcagtccggttaga

SEQ ID NO: 1447 - DNA, 20 bp, synthetic construct
  source 1..20: mol_type = other DNA
ccagcttaggacttaggatg

SEQ ID NO: 1448 - DNA, 20 bp, synthetic construct
  source 1..20: mol_type = other DNA
tgagaacggatactaagggc

SEQ ID NO: 1449 - DNA, 20 bp, synthetic construct
  source 1..20: mol_type = other DNA
gtatatcaacgaaaaactac

SEQ ID NO: 1450 - DNA, 20 bp, synthetic construct
  source 1..20: mol_type = other DNA
ttggtgacacacctaccctg

SEQ ID NO: 1451 - DNA, 20 bp, synthetic construct
  source 1..20: mol_type = other DNA
gccgaatacccaggtgcccc

SEQ ID NO: 1452 - DNA, 20 bp, synthetic construct
  source 1..20: mol_type = other DNA
gcacggtaaagcccaaagcc

SEQ ID NO: 1453 - DNA, 20 bp, synthetic construct
  source 1..20: mol_type = other DNA
ttataggacagtccccacct

SEQ ID NO: 1454 - DNA, 20 bp, synthetic construct
  source 1..20: mol_type = other DNA
ttccgtctacaggattttct

SEQ ID NO: 1455 - DNA, 20 bp, synthetic construct
  source 1..20: mol_type = other DNA
tctatgagacatgtcactcc

SEQ ID NO: 1456 - DNA, 20 bp, synthetic construct
  source 1..20: mol_type = other DNA
tggcaatgctaagccccatt

SEQ ID NO: 1457 - DNA, 20 bp, synthetic construct
  source 1..20: mol_type = other DNA
aggtttctaggatagcaagg

SEQ ID NO: 1458 - DNA, 20 bp, synthetic construct
  source 1..20: mol_type = other DNA
acaccagtaaggattcataa

SEQ ID NO: 1459 - DNA, 20 bp, synthetic construct
  source 1..20: mol_type = other DNA
cgtgcccttctgtggacctc

SEQ ID NO: 1460 - DNA, 20 bp, synthetic construct
  source 1..20: mol_type = other DNA
tatgtgtccgcctcgctctg

SEQ ID NO: 1461 - DNA, 20 bp, synthetic construct
  source 1..20: mol_type = other DNA
cgcagctgctgagagtttgc

SEQ ID NO: 1462 - DNA, 20 bp, synthetic construct
  source 1..20: mol_type = other DNA
gttttttgggcccctagact

SEQ ID NO: 1463 - DNA, 20 bp, synthetic construct
  source 1..20: mol_type = other DNA
ctgctttagggactattgga

SEQ ID NO: 1464 - DNA, 20 bp, synthetic construct
  source 1..20: mol_type = other DNA
tagcaactgttccatcatag

SEQ ID NO: 1465 - DNA, 20 bp, synthetic construct
  source 1..20: mol_type = other DNA
tcaccaggagttgtggattc

SEQ ID NO: 1466 - DNA, 20 bp, synthetic construct
  source 1..20: mol_type = other DNA
gactcagcccaagtgcctta

SEQ ID NO: 1467 - DNA, 20 bp, synthetic construct
  source 1..20: mol_type = other DNA
atgctagctctgactaggat

SEQ ID NO: 1468 - DNA, 20 bp, synthetic construct
  source 1..20: mol_type = other DNA
tgtatcacaaaagcacgcgc

SEQ ID NO: 1469 - DNA, 20 bp, synthetic construct
  source 1..20: mol_type = other DNA
cgtcttacgaggagacttgg

SEQ ID NO: 1470 - DNA, 20 bp, synthetic construct
  source 1..20: mol_type = other DNA
ggacttagtctattttgatg

SEQ ID NO: 1471 - DNA, 20 bp, synthetic construct
  source 1..20: mol_type = other DNA
aacctgtaggatcgggccaa

SEQ ID NO: 1472 - DNA, 20 bp, synthetic construct
  source 1..20: mol_type = other DNA
gcgcctgtaccaagtgccag

SEQ ID NO: 1473 - DNA, 20 bp, synthetic construct
  source 1..20: mol_type = other DNA
gagagagacccacttagctt

SEQ ID NO: 1474 - DNA, 20 bp, synthetic construct
  source 1..20: mol_type = other DNA
gcaccaaagacccctagcca

SEQ ID NO: 1475 - DNA, 20 bp, synthetic construct
  source 1..20: mol_type = other DNA
ccaccatcgcgatcggcctg

SEQ ID NO: 1476 - DNA, 20 bp, synthetic construct
  source 1..20: mol_type = other DNA
ctccaccccttatgtagata

SEQ ID NO: 1477 - DNA, 20 bp, synthetic construct
  source 1..20: mol_type = other DNA
acggcgatgtgggtgcaaac

SEQ ID NO: 1478 - DNA, 20 bp, synthetic construct
  source 1..20: mol_type = other DNA
acctaggcagaaggaggccg

SEQ ID NO: 1479 - DNA, 20 bp, synthetic construct
  source 1..20: mol_type = other DNA
ggacaaagtgcggtttaaag

SEQ ID NO: 1480 - DNA, 20 bp, synthetic construct
  source 1..20: mol_type = other DNA
cgtgtacggccccaccagga

SEQ ID NO: 1481 - DNA, 20 bp, synthetic construct
  source 1..20: mol_type = other DNA
tgccaaccactcatggaagt

SEQ ID NO: 1482 - DNA, 20 bp, synthetic construct
  source 1..20: mol_type = other DNA
agtccacggcaccggcacac

SEQ ID NO: 1483 - DNA, 20 bp, synthetic construct
  source 1..20: mol_type = other DNA
atggcggtgatctgggacac

SEQ ID NO: 1484 - DNA, 20 bp, synthetic construct
  source 1..20: mol_type = other DNA
cggccggcgataaagaagta

SEQ ID NO: 1485 - DNA, 20 bp, synthetic construct
  source 1..20: mol_type = other DNA
gcgctggcatgatgaagaag

SEQ ID NO: 1486 - DNA, 20 bp, synthetic construct
  source 1..20: mol_type = other DNA
ttgttcatgtcgggaaggct

SEQ ID NO: 1487 - DNA, 20 bp, synthetic construct
  source 1..20: mol_type = other DNA
gctattgaagaggccgattc

SEQ ID NO: 1488 - DNA, 20 bp, synthetic construct
  source 1..20: mol_type = other DNA
gtgtagccccaaggctcata

SEQ ID NO: 1489 - DNA, 20 bp, synthetic construct
  source 1..20: mol_type = other DNA
tgagctgcgagcaggaatca

SEQ ID NO: 1490 - DNA, 20 bp, synthetic construct
  source 1..20: mol_type = other DNA
tgtggcgcgcagacatatag

SEQ ID NO: 1491 - DNA, 20 bp, synthetic construct
  source 1..20: mol_type = other DNA
tcttcctccagcggcccgtt

SEQ ID NO: 1492 - DNA, 20 bp, synthetic construct
  source 1..20: mol_type = other DNA
cgctcggcgcggccactctg

SEQ ID NO: 1493 - DNA, 20 bp, synthetic construct
  source 1..20: mol_type = other DNA
tggagtgtttggcggactgg

SEQ ID NO: 1494 - DNA, 20 bp, synthetic construct
  source 1..20: mol_type = other DNA
tagaatttgtaagccacacg

SEQ ID NO: 1495 - DNA, 20 bp, synthetic construct
  source 1..20: mol_type = other DNA
ccggctctggacttgatcgc

SEQ ID NO: 1496 - DNA, 20 bp, synthetic construct
  source 1..20: mol_type = other DNA
tgcttggccaaagtgtaggg

SEQ ID NO: 1497 - DNA, 20 bp, synthetic construct
  source 1..20: mol_type = other DNA
agggatcagtatgcagtaac

SEQ ID NO: 1498 - DNA, 20 bp, synthetic construct
  source 1..20: mol_type = other DNA
ttcatctcatctccggacac

SEQ ID NO: 1499 - DNA, 20 bp, synthetic construct
  source 1..20: mol_type = other DNA
ccctagtagccccgtcctcc

SEQ ID NO: 1500 - DNA, 20 bp, synthetic construct
  source 1..20: mol_type = other DNA
ggtatctagtctctcggaag

SEQ ID NO: 1501 - DNA, 20 bp, synthetic construct
  source 1..20: mol_type = other DNA
ataggtctgaaaccccggca

SEQ ID NO: 1502 - DNA, 20 bp, synthetic construct
  source 1..20: mol_type = other DNA
cgccgctcaggcctcctatc

SEQ ID NO: 1503 - DNA, 20 bp, synthetic construct
  source 1..20: mol_type = other DNA
tacgcatgtgtcccaggcca

SEQ ID NO: 1504 - DNA, 20 bp, synthetic construct
  source 1..20: mol_type = other DNA
gcgatacccggctgggtgtt

SEQ ID NO: 1505 - DNA, 20 bp, synthetic construct
  source 1..20: mol_type = other DNA
ggactcaggttcccgagttc

SEQ ID NO: 1506 - DNA, 20 bp, synthetic construct
  source 1..20: mol_type = other DNA
gactgggagcccatagtttg

SEQ ID NO: 1507 - DNA, 20 bp, synthetic construct
  source 1..20: mol_type = other DNA
tgggtgtcctatcacgcctc

SEQ ID NO: 1508 - DNA, 20 bp, synthetic construct
  source 1..20: mol_type = other DNA
tgaccaggctgtctttcgat

SEQ ID NO: 1509 - DNA, 20 bp, synthetic construct
  source 1..20: mol_type = other DNA
aacaatgacaatcaccgccc

SEQ ID NO: 1510 - DNA, 20 bp, synthetic construct
  source 1..20: mol_type = other DNA
cacagtcggacctgaatgga

SEQ ID NO: 1511 - DNA, 20 bp, synthetic construct
  source 1..20: mol_type = other DNA
tcgccgacctggctttttgc

SEQ ID NO: 1512 - DNA, 20 bp, synthetic construct
  source 1..20: mol_type = other DNA
cgccctcggccacgccacac

SEQ ID NO: 1513 - DNA, 20 bp, synthetic construct
  source 1..20: mol_type = other DNA
tgtcctgtgtctatgccccc

SEQ ID NO: 1514 - DNA, 20 bp, synthetic construct
  source 1..20: mol_type = other DNA
caggcagatgtctatagact

SEQ ID NO: 1515 - DNA, 20 bp, synthetic construct
  source 1..20: mol_type = other DNA
ggattaaaggaccctatgac

SEQ ID NO: 1516 - DNA, 20 bp, synthetic construct
  source 1..20: mol_type = other DNA
tatgcttggaagactagagt

SEQ ID NO: 1517 - DNA, 20 bp, synthetic construct
  source 1..20: mol_type = other DNA
ataggagcagccagttcctc

SEQ ID NO: 1518 - DNA, 20 bp, synthetic construct
  source 1..20: mol_type = other DNA
ggtcctggacatagtttcca

SEQ ID NO: 1519 - DNA, 20 bp, synthetic construct
  source 1..20: mol_type = other DNA
ctgaggattttttggccaac

SEQ ID NO: 1520 - DNA, 20 bp, synthetic construct
  source 1..20: mol_type = other DNA
ggtcaatctgtcaccactac

SEQ ID NO: 1521 - DNA, 20 bp, synthetic construct
  source 1..20: mol_type = other DNA
gccactgtctccacgagtgt

SEQ ID NO: 1522 - DNA, 20 bp, synthetic construct
  source 1..20: mol_type = other DNA
agctgcctacctcattcacg

SEQ ID NO: 1523 - DNA, 20 bp, synthetic construct
  source 1..20: mol_type = other DNA
cccagcttaggacttaggat

SEQ ID NO: 1524 - DNA, 20 bp, synthetic construct
  source 1..20: mol_type = other DNA
ctgagaacggatactaaggg

SEQ ID NO: 1525 - DNA, 20 bp, synthetic construct
  source 1..20: mol_type = other DNA
cttacagggacccaatcatt

SEQ ID NO: 1526 - DNA, 20 bp, synthetic construct
  source 1..20: mol_type = other DNA
ccttggtgacacacctaccc

SEQ ID NO: 1527 - DNA, 20 bp, synthetic construct
  source 1..20: mol_type = other DNA
ggccgaatacccaggtgccc

SEQ ID NO: 1528 - DNA, 20 bp, synthetic construct
  source 1..20: mol_type = other DNA
ggcacggtaaagcccaaagc

SEQ ID NO: 1529 - DNA, 20 bp, synthetic construct
  source 1..20: mol_type = other DNA
attataggacagtccccacc

SEQ ID NO: 1530 - DNA, 20 bp, synthetic construct
  source 1..20: mol_type = other DNA
aaattccgtctacaggattt

SEQ ID NO: 1531 - DNA, 20 bp, synthetic construct
  source 1..20: mol_type = other DNA
ctctatgagacatgtcactc

SEQ ID NO: 1532 - DNA, 20 bp, synthetic construct
  source 1..20: mol_type = other DNA
gtacttgtcctgcagatggc

SEQ ID NO: 1533 - DNA, 20 bp, synthetic construct
  source 1..20: mol_type = other DNA
taggtttctaggatagcaag

SEQ ID NO: 1534 - DNA, 20 bp, synthetic construct
  source 1..20: mol_type = other DNA
cacaccagtaaggattcata

SEQ ID NO: 1535 - DNA, 20 bp, synthetic construct
  source 1..20: mol_type = other DNA
aagttgcacgagtcagcacg

SEQ ID NO: 1536 - DNA, 20 bp, synthetic construct
  source 1..20: mol_type = other DNA
gtatgtgtccgcctcgctct

SEQ ID NO: 1537 - DNA, 20 bp, synthetic construct
  source 1..20: mol_type = other DNA
aaccgcagctgctgagagtt

SEQ ID NO: 1538 - DNA, 20 bp, synthetic construct
  source 1..20: mol_type = other DNA
tagttttttgggcccctaga

SEQ ID NO: 1539 - DNA, 20 bp, synthetic construct
  source 1..20: mol_type = other DNA
gctgctttagggactattgg

SEQ ID NO: 1540 - DNA, 20 bp, synthetic construct
  source 1..20: mol_type = other DNA
ggtgtatagttcttagcaac

SEQ ID NO: 1541 - DNA, 20 bp, synthetic construct
  source 1..20: mol_type = other DNA
atcaccaggagttgtggatt

SEQ ID NO: 1542 - DNA, 20 bp, synthetic construct
  source 1..20: mol_type = other DNA
ggtggaaaatcacctggtag

SEQ ID NO: 1543 - DNA, 20 bp, synthetic construct
  source 1..20: mol_type = other DNA
gacatgctagctctgactag

SEQ ID NO: 1544 - DNA, 20 bp, synthetic construct
  source 1..20: mol_type = other DNA
ttgtatcacaaaagcacgcg

SEQ ID NO: 1545 - DNA, 20 bp, synthetic construct
  source 1..20: mol_type = other DNA
aggtggagttgatgggcact

SEQ ID NO: 1546 - DNA, 20 bp, synthetic construct
  source 1..20: mol_type = other DNA
cggacttagtctattttgat

SEQ ID NO: 1547 - DNA, 20 bp, synthetic construct
  source 1..20: mol_type = other DNA
caacctgtaggatcgggcca

SEQ ID NO: 1548 - DNA, 20 bp, synthetic construct
  source 1..20: mol_type = other DNA
acaccgccctctactggcgc

SEQ ID NO: 1549 - DNA, 20 bp, synthetic construct
  source 1..20: mol_type = other DNA
ggagagagacccacttagct

SEQ ID NO: 1550 - DNA, 20 bp, synthetic construct
  source 1..20: mol_type = other DNA
tgcaccaaagacccctagcc

SEQ ID NO: 1551 - DNA, 20 bp, synthetic construct
  source 1..20: mol_type = other DNA
gccaccatcgcgatcggcct

SEQ ID NO: 1552 - DNA, 20 bp, synthetic construct
  source 1..20: mol_type = other DNA
actccaccccttatgtagat

SEQ ID NO: 1553 - DNA, 20 bp, synthetic construct
  source 1..20: mol_type = other DNA
tacggcgatgtgggtgcaaa

SEQ ID NO: 1554 - DNA, 20 bp, synthetic construct
  source 1..20: mol_type = other DNA
accgcacccctgccccgaag

SEQ ID NO: 1555 - DNA, 20 bp, synthetic construct
  source 1..20: mol_type = other DNA
tgtctagggaatgcaccagg

SEQ ID NO: 1556 - DNA, 20 bp, synthetic construct
  source 1..20: mol_type = other DNA
tggacaaagtgcggtttaaa

SEQ ID NO: 1557 - DNA, 20 bp, synthetic construct
  source 1..20: mol_type = other DNA
tccgtgtacggccccaccag

SEQ ID NO: 1558 - DNA, 20 bp, synthetic construct
  source 1..20: mol_type = other DNA
gcctgccaaccactcatgga

SEQ ID NO: 1559 - DNA, 20 bp, synthetic construct
  source 1..20: mol_type = other DNA
aagtccacggcaccggcaca

SEQ ID NO: 1560 - DNA, 20 bp, synthetic construct
  source 1..20: mol_type = other DNA
tcgatggcggtgatctggga

SEQ ID NO: 1561 - DNA, 20 bp, synthetic construct
  source 1..20: mol_type = other DNA
tagcggccggcgataaagaa

SEQ ID NO: 1562 - DNA, 20 bp, synthetic construct
  source 1..20: mol_type = other DNA
cgcgctggcatgatgaagaa

SEQ ID NO: 1563 - DNA, 20 bp, synthetic construct
  source 1..20: mol_type = other DNA
tcttgttcatgtcgggaagg

SEQ ID NO: 1564 - DNA, 20 bp, synthetic construct
  source 1..20: mol_type = other DNA
tgctattgaagaggccgatt

SEQ ID NO: 1565 - DNA, 20 bp, synthetic construct
  source 1..20: mol_type = other DNA
tgtgtagccccaaggctcat

SEQ ID NO: 1566 - DNA, 20 bp, synthetic construct
  source 1..20: mol_type = other DNA
ccggctctgctgacagaaac

SEQ ID NO: 1567 - DNA, 20 bp, synthetic construct
  source 1..20: mol_type = other DNA
atgtggcgcgcagacatata

SEQ ID NO: 1568 - DNA, 20 bp, synthetic construct
  source 1..20: mol_type = other DNA
gtcttcctccagcggcccgt

SEQ ID NO: 1569 - DNA, 20 bp, synthetic construct
  source 1..20: mol_type = other DNA
acgctcggcgcggccactct

SEQ ID NO: 1570 - DNA, 20 bp, synthetic construct
  source 1..20: mol_type = other DNA
gtggagtgtttggcggactg

SEQ ID NO: 1571 - DNA, 20 bp, synthetic construct
  source 1..20: mol_type = other DNA
cctgctctgtatgctgtaga

SEQ ID NO: 1572 - DNA, 20 bp, synthetic construct
  source 1..20: mol_type = other DNA
cccggctctggacttgatcg

SEQ ID NO: 1573 - DNA, 20 bp, synthetic construct
  source 1..20: mol_type = other DNA
agccaagtggttctaccacc

SEQ ID NO: 1574 - DNA, 20 bp, synthetic construct
  source 1..20: mol_type = other DNA
aagggatcagtatgcagtaa

SEQ ID NO: 1575 - DNA, 20 bp, synthetic construct
  source 1..20: mol_type = other DNA
tttcatctcatctccggaca

SEQ ID NO: 1576 - DNA, 20 bp, synthetic construct
  source 1..20: mol_type = other DNA
cccctagtagccccgtcctc

SEQ ID NO: 1577 - DNA, 20 bp, synthetic construct
  source 1..20: mol_type = other DNA
aggtatctagtctctcggaa

SEQ ID NO: 1578 - DNA, 20 bp, synthetic construct
  source 1..20: mol_type = other DNA
cataggtctgaaaccccggc

SEQ ID NO: 1579 - DNA, 20 bp, synthetic construct
  source 1..20: mol_type = other DNA
ccgccgctcaggcctcctat

SEQ ID NO: 1580 - DNA, 20 bp, synthetic construct
  source 1..20: mol_type = other DNA
ccagtacgcatgtgtcccag

SEQ ID NO: 1581 - DNA, 20 bp, synthetic construct
  source 1..20: mol_type = other DNA
ggcgatacccggctgggtgt

SEQ ID NO: 1582 - DNA, 20 bp, synthetic construct
  source 1..20: mol_type = other DNA
tacccggactcaggttcccg

SEQ ID NO: 1583 - DNA, 20 bp, synthetic construct
  source 1..20: mol_type = other DNA
ggactgggagcccatagttt

SEQ ID NO: 1584 - DNA, 20 bp, synthetic construct
  source 1..20: mol_type = other DNA
ctgggtgtcctatcacgcct

SEQ ID NO: 1585 - DNA, 20 bp, synthetic construct
  source 1..20: mol_type = other DNA
ttgaccaggctgtctttcga

SEQ ID NO: 1586 - DNA, 20 bp, synthetic construct
  source 1..20: mol_type = other DNA
taacaatgacaatcaccgcc

SEQ ID NO: 1587 - DNA, 20 bp, synthetic construct
  source 1..20: mol_type = other DNA
acacagtcggacctgaatgg

SEQ ID NO: 1588 - DNA, 20 bp, synthetic construct
  source 1..20: mol_type = other DNA
ctcgccgacctggctttttg

SEQ ID NO: 1589 - DNA, 20 bp, synthetic construct
  source 1..20: mol_type = other DNA
ccgccctcggccacgccaca

SEQ ID NO: 1590 - DNA, 20 bp, synthetic construct
  source 1..20: mol_type = other DNA
atgtcctgtgtctatgcccc

SEQ ID NO: 1591 - DNA, 20 bp, synthetic construct
  source 1..20: mol_type = other DNA
gcaggcagatgtctatagac

SEQ ID NO: 1592 - DNA, 20 bp, synthetic construct
  source 1..20: mol_type = other DNA
ttggattaaaggaccctatg

SEQ ID NO: 1593 - DNA, 20 bp, synthetic construct
  source 1..20: mol_type = other DNA
ctatgcttggaagactagag

SEQ ID NO: 1594 - DNA, 20 bp, synthetic construct
  source 1..20: mol_type = other DNA
cataggagcagccagttcct

SEQ ID NO: 1595 - DNA, 20 bp, synthetic construct
  source 1..20: mol_type = other DNA
gattggacagactgaagttt

SEQ ID NO: 1596 - DNA, 20 bp, synthetic construct
  source 1..20: mol_type = other DNA
ggacctgtaaatccctgagg

SEQ ID NO: 1597 - DNA, 20 bp, synthetic construct
  source 1..20: mol_type = other DNA
aggtcaatctgtcaccacta

SEQ ID NO: 1598 - DNA, 20 bp, synthetic construct
  source 1..20: mol_type = other DNA
cgttctccaggttgttgtag

SEQ ID NO: 1599 - DNA, 20 bp, synthetic construct
  source 1..20: mol_type = other DNA
catagacagctgcctacctc

SEQ ID NO: 1600 - DNA, 20 bp, synthetic construct
  source 1..20: mol_type = other DNA
ccccagcttaggacttagga

SEQ ID NO: 1601 - DNA, 20 bp, synthetic construct
  source 1..20: mol_type = other DNA
actgagaacggatactaagg

SEQ ID NO: 1602 - DNA, 20 bp, synthetic construct
  source 1..20: mol_type = other DNA
tcttacagggacccaatcat

SEQ ID NO: 1603 - DNA, 20 bp, synthetic construct
  source 1..20: mol_type = other DNA
cccttggtgacacacctacc

SEQ ID NO: 1604 - DNA, 20 bp, synthetic construct
  source 1..20: mol_type = other DNA
aggccgaatacccaggtgcc

SEQ ID NO: 1605 - DNA, 20 bp, synthetic construct
  source 1..20: mol_type = other DNA
aggcacggtaaagcccaaag

SEQ ID NO: 1606 - DNA, 20 bp, synthetic construct
  source 1..20: mol_type = other DNA
gagaattataggacagtccc

SEQ ID NO: 1607 - DNA, 20 bp, synthetic construct
  source 1..20: mol_type = other DNA
taaattccgtctacaggatt

SEQ ID NO: 1608 - DNA, 20 bp, synthetic construct
  source 1..20: mol_type = other DNA
ctaccccttctctatgagac

SEQ ID NO: 1609 - DNA, 20 bp, synthetic construct
  source 1..20: mol_type = other DNA
acttgtacttgtcctgcaga

SEQ ID NO: 1610 - DNA, 20 bp, synthetic construct
  source 1..20: mol_type = other DNA
ccttaggtttctaggatagc

SEQ ID NO: 1611 - DNA, 20 bp, synthetic construct
  source 1..20: mol_type = other DNA
actcacaccagtaaggattc

SEQ ID NO: 1612 - DNA, 20 bp, synthetic construct
  source 1..20: mol_type = other DNA
gaagttgcacgagtcagcac

SEQ ID NO: 1613 - DNA, 20 bp, synthetic construct
  source 1..20: mol_type = other DNA
tgtatgtgtccgcctcgctc

SEQ ID NO: 1614 - DNA, 20 bp, synthetic construct
  source 1..20: mol_type = other DNA
aaaccgcagctgctgagagt

SEQ ID NO: 1615 - DNA, 20 bp, synthetic construct
  source 1..20: mol_type = other DNA
tgtagttttttgggccccta

SEQ ID NO: 1616 - DNA, 20 bp, synthetic construct
  source 1..20: mol_type = other DNA
ggctgctttagggactattg

SEQ ID NO: 1617 - DNA, 20 bp, synthetic construct
  source 1..20: mol_type = other DNA
gtgtgataggaagtcctgag

SEQ ID NO: 1618 - DNA, 20 bp, synthetic construct
  source 1..20: mol_type = other DNA
gatcaccaggagttgtggat

SEQ ID NO: 1619 - DNA, 20 bp, synthetic construct
  source 1..20: mol_type = other DNA
acccggtgtgtagccccaag

SEQ ID NO: 1620 - DNA, 20 bp, synthetic construct
  source 1..20: mol_type = other DNA
agacatgctagctctgacta

SEQ ID NO: 1621 - DNA, 20 bp, synthetic construct
  source 1..20: mol_type = other DNA
tacatgagctattgtatcac

SEQ ID NO: 1622 - DNA, 20 bp, synthetic construct
  source 1..20: mol_type = other DNA
actggctaatgtgaaccaac

SEQ ID NO: 1623 - DNA, 20 bp, synthetic construct
  source 1..20: mol_type = other DNA
tgtacggacttagtctattt

SEQ ID NO: 1624 - DNA, 20 bp, synthetic construct
  source 1..20: mol_type = other DNA
acaacctgtaggatcgggcc

SEQ ID NO: 1625 - DNA, 20 bp, synthetic construct
  source 1..20: mol_type = other DNA
aacaccgccctctactggcg

SEQ ID NO: 1626 - DNA, 20 bp, synthetic construct
  source 1..20: mol_type = other DNA
gcactcagctgcgggaaggc

SEQ ID NO: 1627 - DNA, 20 bp, synthetic construct
  source 1..20: mol_type = other DNA
ctgcaccaaagacccctagc

SEQ ID NO: 1628 - DNA, 20 bp, synthetic construct
  source 1..20: mol_type = other DNA
gagccaccatcgcgatcggc

SEQ ID NO: 1629 - DNA, 20 bp, synthetic construct
  source 1..20: mol_type = other DNA
tgactccaccccttatgtag

SEQ ID NO: 1630 - DNA, 20 bp, synthetic construct
  source 1..20: mol_type = other DNA
atacggcgatgtgggtgcaa

SEQ ID NO: 1631 - DNA, 20 bp, synthetic construct
  source 1..20: mol_type = other DNA
tattgcaagaccgcacccct

SEQ ID NO: 1632 - DNA, 20 bp, synthetic construct
  source 1..20: mol_type = other DNA
gtgtctagggaatgcaccag

SEQ ID NO: 1633 - DNA, 20 bp, synthetic construct
  source 1..20: mol_type = other DNA
atggacaaagtgcggtttaa

SEQ ID NO: 1634 - DNA, 20 bp, synthetic construct
  source 1..20: mol_type = other DNA
tgctccgtgtacggccccac

SEQ ID NO: 1635 - DNA, 20 bp, synthetic construct
  source 1..20: mol_type = other DNA
acgcctgccaaccactcatg

SEQ ID NO: 1636 - DNA, 20 bp, synthetic construct
  source 1..20: mol_type = other DNA
gaagtccacggcaccggcac

SEQ ID NO: 1637 - DNA, 20 bp, synthetic construct
  source 1..20: mol_type = other DNA
ctcgatggcggtgatctggg

SEQ ID NO: 1638 - DNA, 20 bp, synthetic construct
  source 1..20: mol_type = other DNA
atagcggccggcgataaaga

SEQ ID NO: 1639 - DNA, 20 bp, synthetic construct
  source 1..20: mol_type = other DNA
ccgcgctggcatgatgaaga

SEQ ID NO: 1640 - DNA, 20 bp, synthetic construct
  source 1..20: mol_type = other DNA
atcttgttcatgtcgggaag

SEQ ID NO: 1641 - DNA, 20 bp, synthetic construct
  source 1..20: mol_type = other DNA
ctgctattgaagaggccgat

SEQ ID NO: 1642 - DNA, 20 bp, synthetic construct
  source 1..20: mol_type = other DNA
ggtgtgtagccccaaggctc

SEQ ID NO: 1643 - DNA, 20 bp, synthetic construct
  source 1..20: mol_type = other DNA
gccggctctgctgacagaaa

SEQ ID NO: 1644 - DNA, 20 bp, synthetic construct
  source 1..20: mol_type = other DNA
catgtggcgcgcagacatat

SEQ ID NO: 1645 - DNA, 20 bp, synthetic construct
  source 1..20: mol_type = other DNA
tcgccgtcttcctccagcgg

SEQ ID NO: 1646 - DNA, 20 bp, synthetic construct
  source 1..20: mol_type = other DNA
cgcttgctgccgctggtgga

SEQ ID NO: 1647 - DNA, 20 bp, synthetic construct
  source 1..20: mol_type = other DNA
ggtggagtgtttggcggact

SEQ ID NO: 1648 - DNA, 20 bp, synthetic construct
  source 1..20: mol_type = other DNA
ggcctgctctgtatgctgta

SEQ ID NO: 1649 - DNA, 20 bp, synthetic construct
  source 1..20: mol_type = other DNA
gccccggctctggacttgat

SEQ ID NO: 1650 - DNA, 20 bp, synthetic construct
  source 1..20: mol_type = other DNA
cagccaagtggttctaccac

SEQ ID NO: 1651 - DNA, 20 bp, synthetic construct
  source 1..20: mol_type = other DNA
gaaagggatcagtatgcagt

SEQ ID NO: 1652 - DNA, 20 bp, synthetic construct
  source 1..20: mol_type = other DNA
cacccttgttagccacctcc

SEQ ID NO: 1653 - DNA, 20 bp, synthetic construct
  source 1..20: mol_type = other DNA
tcccctagtagccccgtcct

SEQ ID NO: 1654 - DNA, 20 bp, synthetic construct
  source 1..20: mol_type = other DNA
caggtatctagtctctcgga

SEQ ID NO: 1655 - DNA, 20 bp, synthetic construct
  source 1..20: mol_type = other DNA
tcataggtctgaaaccccgg

SEQ ID NO: 1656 - DNA, 20 bp, synthetic construct
  source 1..20: mol_type = other DNA
tcccaccgccgctcaggcct

SEQ ID NO: 1657 - DNA, 20 bp, synthetic construct
  source 1..20: mol_type = other DNA
tccagtacgcatgtgtccca

SEQ ID NO: 1658 - DNA, 20 bp, synthetic construct
  source 1..20: mol_type = other DNA
tggcgatacccggctgggtg

SEQ ID NO: 1659 - DNA, 20 bp, synthetic construct
  source 1..20: mol_type = other DNA
ctacccggactcaggttccc

SEQ ID NO: 1660 - DNA, 20 bp, synthetic construct
  source 1..20: mol_type = other DNA
ccgaggtccatagttctggg

SEQ ID NO: 1661 - DNA, 20 bp, synthetic construct
  source 1..20: mol_type = other DNA
tctgggtgtcctatcacgcc

SEQ ID NO: 1662 - DNA, 20 bp, synthetic construct
  source 1..20: mol_type = other DNA
gcatgtccattagccaagga

SEQ ID NO: 1663 - DNA, 20 bp, synthetic construct
  source 1..20: mol_type = other DNA
gcttggctgttagtaacaat

SEQ ID NO: 1664 - DNA, 20 bp, synthetic construct
  source 1..20: mol_type = other DNA
gacacagtcggacctgaatg

SEQ ID NO: 1665 - DNA, 20 bp, synthetic construct
  source 1..20: mol_type = other DNA
cctcgccgacctggcttttt

SEQ ID NO: 1666 - DNA, 20 bp, synthetic construct
  source 1..20: mol_type = other DNA
ctatccataggcccattttg

SEQ ID NO: 1667 - DNA, 20 bp, synthetic construct
  source 1..20: mol_type = other DNA
gtcacatgtcctgtgtctat

SEQ ID NO: 1668 - DNA, 20 bp, synthetic construct
  source 1..20: mol_type = other DNA
cgtggttctcccatttgcag

SEQ ID NO: 1669 - DNA, 20 bp, synthetic construct
  source 1..20: mol_type = other DNA
cttggattaaaggaccctat

SEQ ID NO: 1670 - DNA, 20 bp, synthetic construct
  source 1..20: mol_type = other DNA
cctatgcttggaagactaga

SEQ ID NO: 1671 - DNA, 20 bp, synthetic construct
  source 1..20: mol_type = other DNA
ccataggagcagccagttcc

SEQ ID NO: 1672 - DNA, 20 bp, synthetic construct
  source 1..20: mol_type = other DNA
tagattggacagactgaagt

SEQ ID NO: 1673 - DNA, 20 bp, synthetic construct
  source 1..20: mol_type = other DNA
gggacctgtaaatccctgag

SEQ ID NO: 1674 - DNA, 20 bp, synthetic construct
  source 1..20: mol_type = other DNA
agaggtcaatctgtcaccac

SEQ ID NO: 1675 - DNA, 20 bp, synthetic construct
  source 1..20: mol_type = other DNA
atctgccacggtcccagctc

SEQ ID NO: 1676 - DNA, 20 bp, synthetic construct
  source 1..20: mol_type = other DNA
gcatagacagctgcctacct

SEQ ID NO: 1677 - DNA, 20 bp, synthetic construct
  source 1..20: mol_type = other DNA
tccccagcttaggacttagg

SEQ ID NO: 1678 - DNA, 20 bp, synthetic construct
  source 1..20: mol_type = other DNA
cactgagaacggatactaag

SEQ ID NO: 1679 - DNA, 20 bp, synthetic construct
  source 1..20: mol_type = other DNA
cttcttacagggacccaatc

SEQ ID NO: 1680 - DNA, 20 bp, synthetic construct
  source 1..20: mol_type = other DNA
tcccttggtgacacacctac

SEQ ID NO: 1681 - DNA, 20 bp, synthetic construct
  source 1..20: mol_type = other DNA
gaggccgaatacccaggtgc

SEQ ID NO: 1682 - DNA, 20 bp, synthetic construct
  source 1..20: mol_type = other DNA
aaggcacggtaaagcccaaa

SEQ ID NO: 1683 - DNA, 20 bp, synthetic construct
  source 1..20: mol_type = other DNA
cctgtcaaggagaattatag

SEQ ID NO: 1684 - DNA, 20 bp, synthetic construct
  source 1..20: mol_type = other DNA
gtaaattccgtctacaggat

SEQ ID NO: 1685 - DNA, 20 bp, synthetic construct
  source 1..20: mol_type = other DNA
tcggccactttctaggttca

SEQ ID NO: 1686 - DNA, 20 bp, synthetic construct
  source 1..20: mol_type = other DNA
gacttgtacttgtcctgcag

SEQ ID NO: 1687 - DNA, 20 bp, synthetic construct
  source 1..20: mol_type = other DNA
cccttaggtttctaggatag

SEQ ID NO: 1688 - DNA, 20 bp, synthetic construct
  source 1..20: mol_type = other DNA
gcactcacaccagtaaggat

SEQ ID NO: 1689 - DNA, 20 bp, synthetic construct
  source 1..20: mol_type = other DNA
tgaagttgcacgagtcagca

SEQ ID NO: 1690 - DNA, 20 bp, synthetic construct
  source 1..20: mol_type = other DNA
gtgtatgtgtccgcctcgct

SEQ ID NO: 1691 - DNA, 20 bp, synthetic construct
  source 1..20: mol_type = other DNA
gggatctaaagcagctacaa

SEQ ID NO: 1692 - DNA, 20 bp, synthetic construct
  source 1..20: mol_type = other DNA
agttgtagttttttgggccc

SEQ ID NO: 1693 - DNA, 20 bp, synthetic construct
  source 1..20: mol_type = other DNA
aatgaggtgggctgctttag

SEQ ID NO: 1694 - DNA, 20 bp, synthetic construct
  source 1..20: mol_type = other DNA
agtgtgataggaagtcctga

SEQ ID NO: 1695 - DNA, 20 bp, synthetic construct
  source 1..20: mol_type = other DNA
aagtgatcaccaggagttgt

SEQ ID NO: 1696 - DNA, 20 bp, synthetic construct
  source 1..20: mol_type = other DNA
cacccggtgtgtagccccaa

SEQ ID NO: 1697 - DNA, 20 bp, synthetic construct
  source 1..20: mol_type = other DNA
caagacatgctagctctgac

SEQ ID NO: 1698 - DNA, 20 bp, synthetic construct
  source 1..20: mol_type = other DNA
gttcactagtcctcaaaacc

SEQ ID NO: 1699 - DNA, 20 bp, synthetic construct
  source 1..20: mol_type = other DNA
cactggctaatgtgaaccaa

SEQ ID NO: 1700 - DNA, 20 bp, synthetic construct
  source 1..20: mol_type = other DNA
ttgtacggacttagtctatt

SEQ ID NO: 1701 - DNA, 20 bp, synthetic construct
  source 1..20: mol_type = other DNA
cacaacctgtaggatcgggc

SEQ ID NO: 1702 - DNA, 20 bp, synthetic construct
  source 1..20: mol_type = other DNA
acgcctcaacaccgccctct

SEQ ID NO: 1703 - DNA, 20 bp, synthetic construct
  source 1..20: mol_type = other DNA
tgcactcagctgcgggaagg

SEQ ID NO: 1704 - DNA, 20 bp, synthetic construct
  source 1..20: mol_type = other DNA
cctgcaccaaagacccctag

SEQ ID NO: 1705 - DNA, 20 bp, synthetic construct
  source 1..20: mol_type = other DNA
tgagccaccatcgcgatcgg

SEQ ID NO: 1706 - DNA, 20 bp, synthetic construct
  source 1..20: mol_type = other DNA
ctgactccaccccttatgta

SEQ ID NO: 1707 - DNA, 20 bp, synthetic construct
  source 1..20: mol_type = other DNA
catacggcgatgtgggtgca

SEQ ID NO: 1708 - DNA, 20 bp, synthetic construct
  source 1..20: mol_type = other DNA
ctattgcaagaccgcacccc

SEQ ID NO: 1709 - DNA, 20 bp, synthetic construct
  source 1..20: mol_type = other DNA
ggtgtctagggaatgcacca

SEQ ID NO: 1710 - DNA, 20 bp, synthetic construct
  source 1..20: mol_type = other DNA
catggacaaagtgcggttta

SEQ ID NO: 1711 - DNA, 20 bp, synthetic construct
  source 1..20: mol_type = other DNA
ctgctccgtgtacggcccca

SEQ ID NO: 1712 - DNA, 20 bp, synthetic construct
  source 1..20: mol_type = other DNA
ggcacgacacaggcagagtc

SEQ ID NO: 1713 - DNA, 20 bp, synthetic construct
  source 1..20: mol_type = other DNA
agaagtccacggcaccggca

SEQ ID NO: 1714 - DNA, 20 bp, synthetic construct
  source 1..20: mol_type = other DNA
gcctcgatggcggtgatctg

SEQ ID NO: 1715 - DNA, 20 bp, synthetic construct
  source 1..20: mol_type = other DNA
ctcatagcggccggcgataa

SEQ ID NO: 1716 - DNA, 20 bp, synthetic construct
  source 1..20: mol_type = other DNA
gtccgcgctggcatgatgaa

SEQ ID NO: 1717 - DNA, 20 bp, synthetic construct
  source 1..20: mol_type = other DNA
catcttgttcatgtcgggaa

SEQ ID NO: 1718 - DNA, 20 bp, synthetic construct
  source 1..20: mol_type = other DNA
actgctattgaagaggccga

SEQ ID NO: 1719 - DNA, 20 bp, synthetic construct
  source 1..20: mol_type = other DNA
cggtgtgtagccccaaggct

SEQ ID NO: 1720 - DNA, 20 bp, synthetic construct
  source 1..20: mol_type = other DNA
ccgccggctctgctgacaga

SEQ ID NO: 1721 - DNA, 20 bp, synthetic construct
  source 1..20: mol_type = other DNA
ccatgtggcgcgcagacata

SEQ ID NO: 1722 - DNA, 20 bp, synthetic construct
  source 1..20: mol_type = other DNA
ggtccttggcggcctcctcg

SEQ ID NO: 1723 - DNA, 20 bp, synthetic construct
  source 1..20: mol_type = other DNA
ttgcgcttgctgccgctggt

SEQ ID NO: 1724 - DNA, 20 bp, synthetic construct
  source 1..20: mol_type = other DNA
gcacggctttgtggattctg

SEQ ID NO: 1725 - DNA, 20 bp, synthetic construct
  source 1..20: mol_type = other DNA
cccgcatgccgggcctgagc

SEQ ID NO: 1726 - DNA, 20 bp, synthetic construct
  source 1..20: mol_type = other DNA
tgccccggctctggacttga

SEQ ID NO: 1727 - DNA, 20 bp, synthetic construct
  source 1..20: mol_type = other DNA
agcagccaagtggttctacc

SEQ ID NO: 1728 - DNA, 20 bp, synthetic construct
  source 1..20: mol_type = other DNA
gttctagaacccagtgacct

SEQ ID NO: 1729 - DNA, 20 bp, synthetic construct
  source 1..20: mol_type = other DNA
tcacccttgttagccacctc

SEQ ID NO: 1730 - DNA, 20 bp, synthetic construct
  source 1..20: mol_type = other DNA
ggttcccctagtagccccgt

SEQ ID NO: 1731 - DNA, 20 bp, synthetic construct
  source 1..20: mol_type = other DNA
ccaggtatctagtctctcgg

SEQ ID NO: 1732 - DNA, 20 bp, synthetic construct
  source 1..20: mol_type = other DNA
gtcataggtctgaaaccccg

SEQ ID NO: 1733 - DNA, 20 bp, synthetic construct
  source 1..20: mol_type = other DNA
ggtcctcccaccgccgctca

SEQ ID NO: 1734 - DNA, 20 bp, synthetic construct
  source 1..20: mol_type = other DNA
ttccagtacgcatgtgtccc

SEQ ID NO: 1735 - DNA, 20 bp, synthetic construct
  source 1..20: mol_type = other DNA
ctggcgatacccggctgggt

SEQ ID NO: 1736 - DNA, 20 bp, synthetic construct
  source 1..20: mol_type = other DNA
actacccggactcaggttcc

SEQ ID NO: 1737 - DNA, 20 bp, synthetic construct
  source 1..20: mol_type = other DNA
ggccgaggtccatagttctg

SEQ ID NO: 1738 - DNA, 20 bp, synthetic construct
  source 1..20: mol_type = other DNA
gtctgggtgtcctatcacgc

SEQ ID NO: 1739 - DNA, 20 bp, synthetic construct
  source 1..20: mol_type = other DNA
agcatgtccattagccaagg

SEQ ID NO: 1740 - DNA, 20 bp, synthetic construct
  source 1..20: mol_type = other DNA
aagcttggctgttagtaaca

SEQ ID NO: 1741 - DNA, 20 bp, synthetic construct
  source 1..20: mol_type = other DNA
ggacacagtcggacctgaat

SEQ ID NO: 1742 - DNA, 20 bp, synthetic construct
  source 1..20: mol_type = other DNA
tcctcgccgacctggctttt

SEQ ID NO: 1743 - DNA, 20 bp, synthetic construct
  source 1..20: mol_type = other DNA
ctctatccataggcccattt

SEQ ID NO: 1744 - DNA, 20 bp, synthetic construct
  source 1..20: mol_type = other DNA
gcttataaccacatatgtca

SEQ ID NO: 1745 - DNA, 20 bp, synthetic construct
  source 1..20: mol_type = other DNA
ccgtggttctcccatttgca

SEQ ID NO: 1746 - DNA, 20 bp, synthetic construct
  source 1..20: mol_type = other DNA
atccttggattaaaggaccc

SEQ ID NO: 1747 - DNA, 20 bp, synthetic construct
  source 1..20: mol_type = other DNA
ccctatgcttggaagactag

SEQ ID NO: 1748 - DNA, 20 bp, synthetic construct
  source 1..20: mol_type = other DNA
tgccataggagcagccagtt

SEQ ID NO: 1749 - DNA, 20 bp, synthetic construct
  source 1..20: mol_type = other DNA
ttagattggacagactgaag

SEQ ID NO: 1750 - DNA, 20 bp, synthetic construct
  source 1..20: mol_type = other DNA
cggacagggacctgtaaatc

SEQ ID NO: 1751 - DNA, 20 bp, synthetic construct
  source 1..20: mol_type = other DNA
ggagaggtcaatctgtcacc

SEQ ID NO: 1752 - DNA, 20 bp, synthetic construct
  source 1..20: mol_type = other DNA
tcccccatctgccacggtcc

SEQ ID NO: 1753 - DNA, 20 bp, synthetic construct
  source 1..20: mol_type = other DNA
tggcatagacagctgcctac

SEQ ID NO: 1754 - DNA, 20 bp, synthetic construct
  source 1..20: mol_type = other DNA
ggtccccagcttaggactta

SEQ ID NO: 1755 - DNA, 20 bp, synthetic construct
  source 1..20: mol_type = other DNA
tcactgagaacggatactaa

SEQ ID NO: 1756 - DNA, 20 bp, synthetic construct
  source 1..20: mol_type = other DNA
gcttcttacagggacccaat

SEQ ID NO: 1757 - DNA, 20 bp, synthetic construct
  source 1..20: mol_type = other DNA
ggccagttcccttggtgaca

SEQ ID NO: 1758 - DNA, 20 bp, synthetic construct
  source 1..20: mol_type = other DNA
ggaggccgaatacccaggtg

SEQ ID NO: 1759 - DNA, 20 bp, synthetic construct
  source 1..20: mol_type = other DNA
caaggcacggtaaagcccaa

SEQ ID NO: 1760 - DNA, 20 bp, synthetic construct
  source 1..20: mol_type = other DNA
tacccattcctgtcaaggag

SEQ ID NO: 1761 - DNA, 20 bp, synthetic construct
  source 1..20: mol_type = other DNA
agtaaattccgtctacagga

SEQ ID NO: 1762 - DNA, 20 bp, synthetic construct
  source 1..20: mol_type = other DNA
ctcggccactttctaggttc

SEQ ID NO: 1763 - DNA, 20 bp, synthetic construct
  source 1..20: mol_type = other DNA
taggacttgtacttgtcctg

SEQ ID NO: 1764 - DNA, 20 bp, synthetic construct
  source 1..20: mol_type = other DNA
acccttaggtttctaggata

SEQ ID NO: 1765 - DNA, 20 bp, synthetic construct
  source 1..20: mol_type = other DNA
ggcactcacaccagtaagga

SEQ ID NO: 1766 - DNA, 20 bp, synthetic construct
  source 1..20: mol_type = other DNA
ctgaagttgcacgagtcagc

SEQ ID NO: 1767 - DNA, 20 bp, synthetic construct
  source 1..20: mol_type = other DNA
cgtgtgcagcaaggcccaag

SEQ ID NO: 1768 - DNA, 20 bp, synthetic construct
  source 1..20: mol_type = other DNA
agggatctaaagcagctaca

SEQ ID NO: 1769 - DNA, 20 bp, synthetic construct
  source 1..20: mol_type = other DNA
gagttgtagttttttgggcc

SEQ ID NO: 1770 - DNA, 20 bp, synthetic construct
  source 1..20: mol_type = other DNA
taatgaggtgggctgcttta

SEQ ID NO: 1771 - DNA, 20 bp, synthetic construct
  source 1..20: mol_type = other DNA
tagtgtgataggaagtcctg

SEQ ID NO: 1772 - DNA, 20 bp, synthetic construct
  source 1..20: mol_type = other DNA
ccaagtgatcaccaggagtt

SEQ ID NO: 1773 - DNA, 20 bp, synthetic construct
  source 1..20: mol_type = other DNA
actcacccggtgtgtagccc

SEQ ID NO: 1774 - DNA, 20 bp, synthetic construct
  source 1..20: mol_type = other DNA
ccccaagacatgctagctct

SEQ ID NO: 1775 - DNA, 20 bp, synthetic construct
  source 1..20: mol_type = other DNA
atccagttcactagtcctca

SEQ ID NO: 1776 - DNA, 20 bp, synthetic construct
  source 1..20: mol_type = other DNA
aacactggctaatgtgaacc

SEQ ID NO: 1777 - DNA, 20 bp, synthetic construct
  source 1..20: mol_type = other DNA
cttgtacggacttagtctat

SEQ ID NO: 1778 - DNA, 20 bp, synthetic construct
  source 1..20: mol_type = other DNA
tcacaacctgtaggatcggg

SEQ ID NO: 1779 - DNA, 20 bp, synthetic construct
  source 1..20: mol_type = other DNA
gtcttaatcgcaatagacgc

SEQ ID NO: 1780 - DNA, 20 bp, synthetic construct
  source 1..20: mol_type = other DNA
gtgcactcagctgcgggaag

SEQ ID NO: 1781 - DNA, 20 bp, synthetic construct
  source 1..20: mol_type = other DNA
gtaggatgagaccctgcacc

SEQ ID NO: 1782 - DNA, 20 bp, synthetic construct
  source 1..20: mol_type = other DNA
atgagccaccatcgcgatcg

SEQ ID NO: 1783 - DNA, 20 bp, synthetic construct
  source 1..20: mol_type = other DNA
atctgactccaccccttatg

SEQ ID NO: 1784 - DNA, 20 bp, synthetic construct
  source 1..20: mol_type = other DNA
gcatacggcgatgtgggtgc

SEQ ID NO: 1785 - DNA, 20 bp, synthetic construct
  source 1..20: mol_type = other DNA
cctattgcaagaccgcaccc

SEQ ID NO: 1786 - DNA, 20 bp, synthetic construct
  source 1..20: mol_type = other DNA
aggtgtctagggaatgcacc

SEQ ID NO: 1787 - DNA, 20 bp, synthetic construct
  source 1..20: mol_type = other DNA
acatggacaaagtgcggttt

SEQ ID NO: 1788 - DNA, 20 bp, synthetic construct
  source 1..20: mol_type = other DNA
gccctgctccgtgtacggcc

SEQ ID NO: 1789 - DNA, 20 bp, synthetic construct
  source 1..20: mol_type = other DNA
gggcacgacacaggcagagt

SEQ ID NO: 1790 - DNA, 20 bp, synthetic construct
  source 1..20: mol_type = other DNA
tagaagtccacggcaccggc

SEQ ID NO: 1791 - DNA, 20 bp, synthetic construct
  source 1..20: mol_type = other DNA
tgcctcgatggcggtgatct

SEQ ID NO: 1792 - DNA, 20 bp, synthetic construct
  source 1..20: mol_type = other DNA
aactcatagcggccggcgat

SEQ ID NO: 1793 - DNA, 20 bp, synthetic construct
  source 1..20: mol_type = other DNA
ggtccgcgctggcatgatga

SEQ ID NO: 1794 - DNA, 20 bp, synthetic construct
  source 1..20: mol_type = other DNA
gcatcttgttcatgtcggga

SEQ ID NO: 1795 - DNA, 20 bp, synthetic construct
  source 1..20: mol_type = other DNA
cactgctattgaagaggccg

SEQ ID NO: 1796 - DNA, 20 bp, synthetic construct
  source 1..20: mol_type = other DNA
ttcccataaccgtgcactca

SEQ ID NO: 1797 - DNA, 20 bp, synthetic construct
  source 1..20: mol_type = other DNA
tacgctgccgccggctctgc

SEQ ID NO: 1798 - DNA, 20 bp, synthetic construct
  source 1..20: mol_type = other DNA
gccatgtggcgcgcagacat

SEQ ID NO: 1799 - DNA, 20 bp, synthetic construct
  source 1..20: mol_type = other DNA
cggtccttggcggcctcctc

SEQ ID NO: 1800 - DNA, 20 bp, synthetic construct
  source 1..20: mol_type = other DNA
agttgcgcttgctgccgctg

SEQ ID NO: 1801 - DNA, 20 bp, synthetic construct
  source 1..20: mol_type = other DNA
ggcccgcatgccgggcctga

SEQ ID NO: 1802 - DNA, 20 bp, synthetic construct
  source 1..20: mol_type = other DNA
agtgccccggctctggactt

SEQ ID NO: 1803 - DNA, 20 bp, synthetic construct
  source 1..20: mol_type = other DNA
gagcagccaagtggttctac

SEQ ID NO: 1804 - DNA, 20 bp, synthetic construct
  source 1..20: mol_type = other DNA
gggttctagaacccagtgac

SEQ ID NO: 1805 - DNA, 20 bp, synthetic construct
  source 1..20: mol_type = other DNA
tgctcacccttgttagccac

SEQ ID NO: 1806 - DNA, 20 bp, synthetic construct
  source 1..20: mol_type = other DNA
gggttcccctagtagccccg

SEQ ID NO: 1807 - DNA, 20 bp, synthetic construct
  source 1..20: mol_type = other DNA
cccaggtatctagtctctcg

SEQ ID NO: 1808 - DNA, 20 bp, synthetic construct
  source 1..20: mol_type = other DNA
ggtcataggtctgaaacccc

SEQ ID NO: 1809 - DNA, 20 bp, synthetic construct
  source 1..20: mol_type = other DNA
aggtcctcccaccgccgctc

SEQ ID NO: 1810 - DNA, 20 bp, synthetic construct
  source 1..20: mol_type = other DNA
attccagtacgcatgtgtcc

SEQ ID NO: 1811 - DNA, 20 bp, synthetic construct
  source 1..20: mol_type = other DNA
cctggcgatacccggctggg

SEQ ID NO: 1812 - DNA, 20 bp, synthetic construct
  source 1..20: mol_type = other DNA
gactacccggactcaggttc

SEQ ID NO: 1813 - DNA, 20 bp, synthetic construct
  source 1..20: mol_type = other DNA
cggccgaggtccatagttct

SEQ ID NO: 1814 - DNA, 20 bp, synthetic construct
  source 1..20: mol_type = other DNA
tgtctgggtgtcctatcacg

SEQ ID NO: 1815 - DNA, 20 bp, synthetic construct
  source 1..20: mol_type = other DNA
tagcatgtccattagccaag

SEQ ID NO: 1816 - DNA, 20 bp, synthetic construct
  source 1..20: mol_type = other DNA
caagcttggctgttagtaac

SEQ ID NO: 1817 - DNA, 20 bp, synthetic construct
  source 1..20: mol_type = other DNA
agggacacagtcggacctga

SEQ ID NO: 1818 - DNA, 20 bp, synthetic construct
  source 1..20: mol_type = other DNA
ctcctcgccgacctggcttt

SEQ ID NO: 1819 - DNA, 20 bp, synthetic construct
  source 1..20: mol_type = other DNA
cctctatccataggcccatt

SEQ ID NO: 1820 - DNA, 20 bp, synthetic construct
  source 1..20: mol_type = other DNA
gctacccttctcccactcgc

SEQ ID NO: 1821 - DNA, 20 bp, synthetic construct
  source 1..20: mol_type = other DNA
atccgtggttctcccatttg

SEQ ID NO: 1822 - DNA, 20 bp, synthetic construct
  source 1..20: mol_type = other DNA
aatccttggattaaaggacc

SEQ ID NO: 1823 - DNA, 20 bp, synthetic construct
  source 1..20: mol_type = other DNA
caagaatccctatgcttgga

SEQ ID NO: 1824 - DNA, 20 bp, synthetic construct
  source 1..20: mol_type = other DNA
atgccataggagcagccagt

SEQ ID NO: 1825 - DNA, 20 bp, synthetic construct
  source 1..20: mol_type = other DNA
ggttagattggacagactga

SEQ ID NO: 1826 - DNA, 20 bp, synthetic construct
  source 1..20: mol_type = other DNA
ccggacagggacctgtaaat

SEQ ID NO: 1827 - DNA, 20 bp, synthetic construct
  source 1..20: mol_type = other DNA
gggagaggtcaatctgtcac

SEQ ID NO: 1828 - DNA, 20 bp, synthetic construct
  source 1..20: mol_type = other DNA
agtcccccatctgccacggt

SEQ ID NO: 1829 - DNA, 20 bp, synthetic construct
  source 1..20: mol_type = other DNA
ttggcatagacagctgccta

SEQ ID NO: 1830 - DNA, 20 bp, synthetic construct
  source 1..20: mol_type = other DNA
tggtccccagcttaggactt

SEQ ID NO: 1831 - DNA, 20 bp, synthetic construct
  source 1..20: mol_type = other DNA
ctcactgagaacggatacta

SEQ ID NO: 1832 - DNA, 20 bp, synthetic construct
  source 1..20: mol_type = other DNA
aagcttcttacagggaccca

SEQ ID NO: 1833 - DNA, 20 bp, synthetic construct
  source 1..20: mol_type = other DNA
ttcctatgaggtcccccctc

SEQ ID NO: 1834 - DNA, 20 bp, synthetic construct
  source 1..20: mol_type = other DNA
aggaggccgaatacccaggt

SEQ ID NO: 1835 - DNA, 20 bp, synthetic construct
  source 1..20: mol_type = other DNA
acaaggcacggtaaagccca

SEQ ID NO: 1836 - DNA, 20 bp, synthetic construct
  source 1..20: mol_type = other DNA
ggatcctgccatacccattc

SEQ ID NO: 1837 - DNA, 20 bp, synthetic construct
  source 1..20: mol_type = other DNA
aagtaaattccgtctacagg

SEQ ID NO: 1838 - DNA, 20 bp, synthetic construct
  source 1..20: mol_type = other DNA
tctcggccactttctaggtt

SEQ ID NO: 1839 - DNA, 20 bp, synthetic construct
  source 1..20: mol_type = other DNA
ttaggacttgtacttgtcct

SEQ ID NO: 1840 - DNA, 20 bp, synthetic construct
  source 1..20: mol_type = other DNA
tacccttaggtttctaggat

SEQ ID NO: 1841 - DNA, 20 bp, synthetic construct
  source 1..20: mol_type = other DNA
agaacggagtaatgagaggg

SEQ ID NO: 1842 - DNA, 20 bp, synthetic construct
  source 1..20: mol_type = other DNA
actgaagttgcacgagtcag

SEQ ID NO: 1843 - DNA, 20 bp, synthetic construct
  source 1..20: mol_type = other DNA
agccgtgtgcagcaaggccc

SEQ ID NO: 1844 - DNA, 20 bp, synthetic construct
  source 1..20: mol_type = other DNA
tagggatctaaagcagctac

SEQ ID NO: 1845 - DNA, 20 bp, synthetic construct
  source 1..20: mol_type = other DNA
cgtcaatgccccagaaagcc

SEQ ID NO: 1846 - DNA, 20 bp, synthetic construct
  source 1..20: mol_type = other DNA
ataatgaggtgggctgcttt

SEQ ID NO: 1847 - DNA, 20 bp, synthetic construct
  source 1..20: mol_type = other DNA
ctagtgtgataggaagtcct

SEQ ID NO: 1848 - DNA, 20 bp, synthetic construct
  source 1..20: mol_type = other DNA
gaccacaaatgcaccggacg

SEQ ID NO: 1849 - DNA, 20 bp, synthetic construct
  source 1..20: mol_type = other DNA
cactcacccggtgtgtagcc

SEQ ID NO: 1850 - DNA, 20 bp, synthetic construct
  source 1..20: mol_type = other DNA
gccccaagacatgctagctc

SEQ ID NO: 1851 - DNA, 20 bp, synthetic construct
  source 1..20: mol_type = other DNA
acatccagttcactagtcct

SEQ ID NO: 1852 - DNA, 20 bp, synthetic construct
  source 1..20: mol_type = other DNA
agcacagcactgccggagtg

SEQ ID NO: 1853 - DNA, 20 bp, synthetic construct
  source 1..20: mol_type = other DNA
tcttgtacggacttagtcta

SEQ ID NO: 1854 - DNA, 20 bp, synthetic construct
  source 1..20: mol_type = other DNA
ctcacaacctgtaggatcgg

SEQ ID NO: 1855 - DNA, 20 bp, synthetic construct
  source 1..20: mol_type = other DNA
cgtcttaatcgcaatagacg

SEQ ID NO: 1856 - DNA, 20 bp, synthetic construct
  source 1..20: mol_type = other DNA
cgtgcactcagctgcgggaa

SEQ ID NO: 1857 - DNA, 20 bp, synthetic construct
  source 1..20: mol_type = other DNA
agtaggatgagaccctgcac

SEQ ID NO: 1858 - DNA, 20 bp, synthetic construct
  source 1..20: mol_type = other DNA
ccatgagccaccatcgcgat

SEQ ID NO: 1859 - DNA, 20 bp, synthetic construct
  source 1..20: mol_type = other DNA
gcaccccatacaaataatcc

SEQ ID NO: 1860 - DNA, 20 bp, synthetic construct
  source 1..20: mol_type = other DNA
tgcatacggcgatgtgggtg

SEQ ID NO: 1861 - DNA, 20 bp, synthetic construct
  source 1..20: mol_type = other DNA
tcctattgcaagaccgcacc

SEQ ID NO: 1862 - DNA, 20 bp, synthetic construct
  source 1..20: mol_type = other DNA
gaggtgtctagggaatgcac

SEQ ID NO: 1863 - DNA, 20 bp, synthetic construct
  source 1..20: mol_type = other DNA
gacatggacaaagtgcggtt

SEQ ID NO: 1864 - DNA, 20 bp, synthetic construct
  source 1..20: mol_type = other DNA
cgccctgctccgtgtacggc

SEQ ID NO: 1865 - DNA, 20 bp, synthetic construct
  source 1..20: mol_type = other DNA
cgggcacgacacaggcagag

SEQ ID NO: 1866 - DNA, 20 bp, synthetic construct
  source 1..20: mol_type = other DNA
gtagaagtccacggcaccgg

SEQ ID NO: 1867 - DNA, 20 bp, synthetic construct
  source 1..20: mol_type = other DNA
tgtgcctcgatggcggtgat

SEQ ID NO: 1868 - DNA, 20 bp, synthetic construct
  source 1..20: mol_type = other DNA
ggagaactcatagcggccgg

SEQ ID NO: 1869 - DNA, 20 bp, synthetic construct
  source 1..20: mol_type = other DNA
tggtccgcgctggcatgatg

SEQ ID NO: 1870 - DNA, 20 bp, synthetic construct
  source 1..20: mol_type = other DNA
agcatcttgttcatgtcggg

SEQ ID NO: 1871 - DNA, 20 bp, synthetic construct
  source 1..20: mol_type = other DNA
ggcactgctattgaagaggc

SEQ ID NO: 1872 - DNA, 20 bp, synthetic construct
  source 1..20: mol_type = other DNA
attcccataaccgtgcactc

SEQ ID NO: 1873 - DNA, 20 bp, synthetic construct
  source 1..20: mol_type = other DNA
atacgctgccgccggctctg

SEQ ID NO: 1874 - DNA, 20 bp, synthetic construct
  source 1..20: mol_type = other DNA
cgccatgtggcgcgcagaca

SEQ ID NO: 1875 - DNA, 20 bp, synthetic construct
  source 1..20: mol_type = other DNA
cgccggtccttggcggcctc

SEQ ID NO: 1876 - DNA, 20 bp, synthetic construct
  source 1..20: mol_type = other DNA
agagttgcgcttgctgccgc

SEQ ID NO: 1877 - DNA, 20 bp, synthetic construct
  source 1..20: mol_type = other DNA
aggcacggctttgtggattc

SEQ ID NO: 1878 - DNA, 20 bp, synthetic construct
  source 1..20: mol_type = other DNA
tggcccgcatgccgggcctg

SEQ ID NO: 1879 - DNA, 20 bp, synthetic construct
  source 1..20: mol_type = other DNA
aagtgccccggctctggact

SEQ ID NO: 1880 - DNA, 20 bp, synthetic construct
  source 1..20: mol_type = other DNA
tgagcagccaagtggttcta

SEQ ID NO: 1881 - DNA, 20 bp, synthetic construct
  source 1..20: mol_type = other DNA
gagcctcgaggtaaatgtgg

SEQ ID NO: 1882 - DNA, 20 bp, synthetic construct
  source 1..20: mol_type = other DNA
cgtgctcacccttgttagcc

SEQ ID NO: 1883 - DNA, 20 bp, synthetic construct
  source 1..20: mol_type = other DNA
aagggttcccctagtagccc

SEQ ID NO: 1884 - DNA, 20 bp, synthetic construct
  source 1..20: mol_type = other DNA
gggtcataggtctgaaaccc

SEQ ID NO: 1885 - DNA, 20 bp, synthetic construct
  source 1..20: mol_type = other DNA
atcctcaggtcctcccaccg

SEQ ID NO: 1886 - DNA, 20 bp, synthetic construct
  source 1..20: mol_type = other DNA
tattccagtacgcatgtgtc

SEQ ID NO: 1887 - DNA, 20 bp, synthetic construct
  source 1..20: mol_type = other DNA
ccctggcgatacccggctgg

SEQ ID NO: 1888 - DNA, 20 bp, synthetic construct
  source 1..20: mol_type = other DNA
tgactacccggactcaggtt

SEQ ID NO: 1889 - DNA, 20 bp, synthetic construct
  source 1..20: mol_type = other DNA
ccggccgaggtccatagttc

SEQ ID NO: 1890 - DNA, 20 bp, synthetic construct
  source 1..20: mol_type = other DNA
ctgtctgggtgtcctatcac

SEQ ID NO: 1891 - DNA, 20 bp, synthetic construct
  source 1..20: mol_type = other DNA
tattagcatgtccattagcc

SEQ ID NO: 1892 - DNA, 20 bp, synthetic construct
  source 1..20: mol_type = other DNA
ccaagcttggctgttagtaa

SEQ ID NO: 1893 - DNA, 20 bp, synthetic construct
  source 1..20: mol_type = other DNA
tagggacacagtcggacctg

SEQ ID NO: 1894 - DNA, 20 bp, synthetic construct
  source 1..20: mol_type = other DNA
gctcctcgccgacctggctt

SEQ ID NO: 1895 - DNA, 20 bp, synthetic construct
  source 1..20: mol_type = other DNA
tcctctatccataggcccat

SEQ ID NO: 1896 - DNA, 20 bp, synthetic construct
  source 1..20: mol_type = other DNA
tgctacccttctcccactcg

SEQ ID NO: 1897 - DNA, 20 bp, synthetic construct
  source 1..20: mol_type = other DNA
tcatccgtggttctcccatt

SEQ ID NO: 1898 - DNA, 20 bp, synthetic construct
  source 1..20: mol_type = other DNA
taatccttggattaaaggac

SEQ ID NO: 1899 - DNA, 20 bp, synthetic construct
  source 1..20: mol_type = other DNA
tccaagaatccctatgcttg

SEQ ID NO: 1900 - DNA, 20 bp, synthetic construct
  source 1..20: mol_type = other DNA
gaatgccataggagcagcca

SEQ ID NO: 1901 - DNA, 20 bp, synthetic construct
  source 1..20: mol_type = other DNA
gggttagattggacagactg

SEQ ID NO: 1902 - DNA, 20 bp, synthetic construct
  source 1..20: mol_type = other DNA
accggacagggacctgtaaa

SEQ ID NO: 1903 - DNA, 20 bp, synthetic construct
  source 1..20: mol_type = other DNA
cccagtagggacaaggactc

SEQ ID NO: 1904 - DNA, 20 bp, synthetic construct
  source 1..20: mol_type = other DNA
cagtcccccatctgccacgg

SEQ ID NO: 1905 - DNA, 20 bp, synthetic construct
  source 1..20: mol_type = other DNA
ctttggcatagacagctgcc

SEQ ID NO: 1906 - DNA, 20 bp, synthetic construct
  source 1..20: mol_type = other DNA
atggtccccagcttaggact

SEQ ID NO: 1907 - DNA, 20 bp, synthetic construct
  source 1..20: mol_type = other DNA
actcactgagaacggatact

SEQ ID NO: 1908 - DNA, 20 bp, synthetic construct
  source 1..20: mol_type = other DNA
caagcttcttacagggaccc

SEQ ID NO: 1909 - DNA, 20 bp, synthetic construct
  source 1..20: mol_type = other DNA
gttcctatgaggtcccccct

SEQ ID NO: 1910 - DNA, 20 bp, synthetic construct
  source 1..20: mol_type = other DNA
aaggaggccgaatacccagg

SEQ ID NO: 1911 - DNA, 20 bp, synthetic construct
  source 1..20: mol_type = other DNA
cacaaggcacggtaaagccc

SEQ ID NO: 1912 - DNA, 20 bp, synthetic construct
  source 1..20: mol_type = other DNA
tgggatcctgccatacccat

SEQ ID NO: 1913 - DNA, 20 bp, synthetic construct
  source 1..20: mol_type = other DNA
cccaaaagtaaattccgtct

SEQ ID NO: 1914 - DNA, 20 bp, synthetic construct
  source 1..20: mol_type = other DNA
aatctcggccactttctagg

SEQ ID NO: 1915 - DNA, 20 bp, synthetic construct
  source 1..20: mol_type = other DNA
tattaggacttgtacttgtc

SEQ ID NO: 1916 - DNA, 20 bp, synthetic construct
  source 1..20: mol_type = other DNA
ctacccttaggtttctagga

SEQ ID NO: 1917 - DNA, 20 bp, synthetic construct
  source 1..20: mol_type = other DNA
tgcatgtgagaacggagtaa

SEQ ID NO: 1918 - DNA, 20 bp, synthetic construct
  source 1..20: mol_type = other DNA
aactgaagttgcacgagtca

SEQ ID NO: 1919 - DNA, 20 bp, synthetic construct
  source 1..20: mol_type = other DNA
gagccgtgtgcagcaaggcc

SEQ ID NO: 1920 - DNA, 20 bp, synthetic construct
  source 1..20: mol_type = other DNA
ttagggatctaaagcagcta

SEQ ID NO: 1921 - DNA, 20 bp, synthetic construct
  source 1..20: mol_type = other DNA
gtactgaagtccctggaccc

SEQ ID NO: 1922 - DNA, 20 bp, synthetic construct
  source 1..20: mol_type = other DNA
cataatgaggtgggctgctt

SEQ ID NO: 1923 - DNA, 20 bp, synthetic construct
  source 1..20: mol_type = other DNA
agctagtgtgataggaagtc

SEQ ID NO: 1924 - DNA, 20 bp, synthetic construct
  source 1..20: mol_type = other DNA
agaccacaaatgcaccggac

SEQ ID NO: 1925 - DNA, 20 bp, synthetic construct
  source 1..20: mol_type = other DNA
acactcacccggtgtgtagc

SEQ ID NO: 1926 - DNA, 20 bp, synthetic construct
  source 1..20: mol_type = other DNA
cgccccaagacatgctagct

SEQ ID NO: 1927 - DNA, 20 bp, synthetic construct
  source 1..20: mol_type = other DNA
gacatccagttcactagtcc

SEQ ID NO: 1928 - DNA, 20 bp, synthetic construct
  source 1..20: mol_type = other DNA
gagcacagcactgccggagt

SEQ ID NO: 1929 - DNA, 20 bp, synthetic construct
  source 1..20: mol_type = other DNA
atcttgtacggacttagtct

SEQ ID NO: 1930 - DNA, 20 bp, synthetic construct
  source 1..20: mol_type = other DNA
tctcacaacctgtaggatcg

SEQ ID NO: 1931 - DNA, 20 bp, synthetic construct
  source 1..20: mol_type = other DNA
ccgtcttaatcgcaatagac

SEQ ID NO: 1932 - DNA, 20 bp, synthetic construct
  source 1..20: mol_type = other DNA
accgtgcactcagctgcggg

SEQ ID NO: 1933 - DNA, 20 bp, synthetic construct
  source 1..20: mol_type = other DNA
aagtaggatgagaccctgca

SEQ ID NO: 1934 - DNA, 20 bp, synthetic construct
  source 1..20: mol_type = other DNA
aaccatgagccaccatcgcg

SEQ ID NO: 1935 - DNA, 20 bp, synthetic construct
  source 1..20: mol_type = other DNA
actgctgcaccccatacaaa

SEQ ID NO: 1936 - DNA, 20 bp, synthetic construct
  source 1..20: mol_type = other DNA
ctgcatacggcgatgtgggt

SEQ ID NO: 1937 - DNA, 20 bp, synthetic construct
  source 1..20: mol_type = other DNA
ttcctattgcaagaccgcac

SEQ ID NO: 1938 - DNA, 20 bp, synthetic construct
  source 1..20: mol_type = other DNA
ccggaggtgtctagggaatg

SEQ ID NO: 1939 - DNA, 20 bp, synthetic construct
  source 1..20: mol_type = other DNA
tcgaattcatcctcccagtc

SEQ ID NO: 1940 - DNA, 20 bp, synthetic construct
  source 1..20: mol_type = other DNA
cacgccctgctccgtgtacg

SEQ ID NO: 1941 - DNA, 20 bp, synthetic construct
  source 1..20: mol_type = other DNA
gccgggcacgacacaggcag

SEQ ID NO: 1942 - DNA, 20 bp, synthetic construct
  source 1..20: mol_type = other DNA
tgtagaagtccacggcaccg

SEQ ID NO: 1943 - DNA, 20 bp, synthetic construct
  source 1..20: mol_type = other DNA
ctgtgcctcgatggcggtga

SEQ ID NO: 1944 - DNA, 20 bp, synthetic construct
  source 1..20: mol_type = other DNA
ttggagaactcatagcggcc

SEQ ID NO: 1945 - DNA, 20 bp, synthetic construct
  source 1..20: mol_type = other DNA
ttggtccgcgctggcatgat

SEQ ID NO: 1946 - DNA, 20 bp, synthetic construct
  source 1..20: mol_type = other DNA
ccagcatcttgttcatgtcg

SEQ ID NO: 1947 - DNA, 20 bp, synthetic construct
  source 1..20: mol_type = other DNA
cggcactgctattgaagagg

SEQ ID NO: 1948 - DNA, 20 bp, synthetic construct
  source 1..20: mol_type = other DNA
gattcccataaccgtgcact

SEQ ID NO: 1949 - DNA, 20 bp, synthetic construct
  source 1..20: mol_type = other DNA
gatacgctgccgccggctct

SEQ ID NO: 1950 - DNA, 20 bp, synthetic construct
  source 1..20: mol_type = other DNA
gtgggtagcggtacccctgg

SEQ ID NO: 1951 - DNA, 20 bp, synthetic construct
  source 1..20: mol_type = other DNA
tgcgccggtccttggcggcc

SEQ ID NO: 1952 - DNA, 20 bp, synthetic construct
  source 1..20: mol_type = other DNA
cagagttgcgcttgctgccg

SEQ ID NO: 1953 - DNA, 20 bp, synthetic construct
  source 1..20: mol_type = other DNA
aaggcacggctttgtggatt

SEQ ID NO: 1954 - DNA, 20 bp, synthetic construct
  source 1..20: mol_type = other DNA
gtggcccgcatgccgggcct

SEQ ID NO: 1955 - DNA, 20 bp, synthetic construct
  source 1..20: mol_type = other DNA
aaagtgccccggctctggac

SEQ ID NO: 1956 - DNA, 20 bp, synthetic construct
  source 1..20: mol_type = other DNA
atgagcagccaagtggttct

SEQ ID NO: 1957 - DNA, 20 bp, synthetic construct
  source 1..20: mol_type = other DNA
agagcctcgaggtaaatgtg

SEQ ID NO: 1958 - DNA, 20 bp, synthetic construct
  source 1..20: mol_type = other DNA
atccactactgtccttctcg

SEQ ID NO: 1959 - DNA, 20 bp, synthetic construct
  source 1..20: mol_type = other DNA
caagggttcccctagtagcc

SEQ ID NO: 1960 - DNA, 20 bp, synthetic construct
  source 1..20: mol_type = other DNA
gacccaggtatctagtctct

SEQ ID NO: 1961 - DNA, 20 bp, synthetic construct
  source 1..20: mol_type = other DNA
agggtcataggtctgaaacc

SEQ ID NO: 1962 - DNA, 20 bp, synthetic construct
  source 1..20: mol_type = other DNA
tcttaagcagccagatcctc

SEQ ID NO: 1963 - DNA, 20 bp, synthetic construct
  source 1..20: mol_type = other DNA
ctattccagtacgcatgtgt

SEQ ID NO: 1964 - DNA, 20 bp, synthetic construct
  source 1..20: mol_type = other DNA
gccctggcgatacccggctg

SEQ ID NO: 1965 - DNA, 20 bp, synthetic construct
  source 1..20: mol_type = other DNA
ctgactacccggactcaggt

SEQ ID NO: 1966 - DNA, 20 bp, synthetic construct
  source 1..20: mol_type = other DNA
cccggccgaggtccatagtt

SEQ ID NO: 1967 - DNA, 20 bp, synthetic construct
  source 1..20: mol_type = other DNA
gcatctgtctgggtgtccta

SEQ ID NO: 1968 - DNA, 20 bp, synthetic construct
  source 1..20: mol_type = other DNA
ctattagcatgtccattagc

SEQ ID NO: 1969 - DNA, 20 bp, synthetic construct
  source 1..20: mol_type = other DNA
tctccaagcttggctgttag

SEQ ID NO: 1970 - DNA, 20 bp, synthetic construct
  source 1..20: mol_type = other DNA
ttagggacacagtcggacct

SEQ ID NO: 1971 - DNA, 20 bp, synthetic construct
  source 1..20: mol_type = other DNA
ccgctcctcgccgacctggc

SEQ ID NO: 1972 - DNA, 20 bp, synthetic construct
  source 1..20: mol_type = other DNA
cctgcgacctctttcctcta

SEQ ID NO: 1973 - DNA, 20 bp, synthetic construct
  source 1..20: mol_type = other DNA
cgtgccccctgcttactttc

SEQ ID NO: 1974 - DNA, 20 bp, synthetic construct
  source 1..20: mol_type = other DNA
ctcatccgtggttctcccat

SEQ ID NO: 1975 - DNA, 20 bp, synthetic construct
  source 1..20: mol_type = other DNA
gctaatccttggattaaagg

SEQ ID NO: 1976 - DNA, 20 bp, synthetic construct
  source 1..20: mol_type = other DNA
gattccaagaatccctatgc

SEQ ID NO: 1977 - DNA, 20 bp, synthetic construct
  source 1..20: mol_type = other DNA
agaatgccataggagcagcc

SEQ ID NO: 1978 - DNA, 20 bp, synthetic construct
  source 1..20: mol_type = other DNA
agggttagattggacagact

SEQ ID NO: 1979 - DNA, 20 bp, synthetic construct
  source 1..20: mol_type = other DNA
aaccggacagggacctgtaa

SEQ ID NO: 1980 - DNA, 20 bp, synthetic construct
  source 1..20: mol_type = other DNA
ccccagtagggacaaggact

SEQ ID NO: 1981 - DNA, 20 bp, synthetic construct
  source 1..20: mol_type = other DNA
gcagtcccccatctgccacg

SEQ ID NO: 1982 - DNA, 20 bp, synthetic construct
  source 1..20: mol_type = other DNA
gctttggcatagacagctgc

SEQ ID NO: 1983 - DNA, 20 bp, synthetic construct
  source 1..20: mol_type = other DNA
ggtaactgatggtccccagc

SEQ ID NO: 1984 - DNA, 20 bp, synthetic construct
  source 1..20: mol_type = other DNA
tactcactgagaacggatac

SEQ ID NO: 1985 - DNA, 20 bp, synthetic construct
  source 1..20: mol_type = other DNA
ggatatatcctctacttcca

SEQ ID NO: 1986 - DNA, 20 bp, synthetic construct
  source 1..20: mol_type = other DNA
atcaatgttgtggttgaatg

SEQ ID NO: 1987 - DNA, 20 bp, synthetic construct
  source 1..20: mol_type = other DNA
taaggaggccgaatacccag

SEQ ID NO: 1988 - DNA, 20 bp, synthetic construct
  source 1..20: mol_type = other DNA
ccacaaggcacggtaaagcc

SEQ ID NO: 1989 - DNA, 20 bp, synthetic construct
  source 1..20: mol_type = other DNA
actgggatcctgccataccc

SEQ ID NO: 1990 - DNA, 20 bp, synthetic construct
  source 1..20: mol_type = other DNA
gcccaaaagtaaattccgtc

SEQ ID NO: 1991 - DNA, 20 bp, synthetic construct
  source 1..20: mol_type = other DNA
gcaatctcggccactttcta

SEQ ID NO: 1992 - DNA, 20 bp, synthetic construct
  source 1..20: mol_type = other DNA
gctacccttaggtttctagg

SEQ ID NO: 1993 - DNA, 20 bp, synthetic construct
  source 1..20: mol_type = other DNA
atgcatgtgagaacggagta

SEQ ID NO: 1994 - DNA, 20 bp, synthetic construct
  source 1..20: mol_type = other DNA
caactgaagttgcacgagtc

SEQ ID NO: 1995 - DNA, 20 bp, synthetic construct
  source 1..20: mol_type = other DNA
ggagccgtgtgcagcaaggc

SEQ ID NO: 1996 - DNA, 20 bp, synthetic construct
  source 1..20: mol_type = other DNA
agttagggatctaaagcagc

SEQ ID NO: 1997 - DNA, 20 bp, synthetic construct
  source 1..20: mol_type = other DNA
agtactgaagtccctggacc

SEQ ID NO: 1998 - DNA, 20 bp, synthetic construct
  source 1..20: mol_type = other DNA
ttcataatgaggtgggctgc

SEQ ID NO: 1999 - DNA, 20 bp, synthetic construct
  source 1..20: mol_type = other DNA
gagctagtgtgataggaagt

SEQ ID NO: 2000 - DNA, 20 bp, synthetic construct
  source 1..20: mol_type = other DNA
aggagaccacaaatgcaccg

SEQ ID NO: 2001 - DNA, 20 bp, synthetic construct
  source 1..20: mol_type = other DNA
tacactcacccggtgtgtag

SEQ ID NO: 2002 - DNA, 20 bp, synthetic construct
  source 1..20: mol_type = other DNA
tcgccccaagacatgctagc

SEQ ID NO: 2003 - DNA, 20 bp, synthetic construct
  source 1..20: mol_type = other DNA
tgacatccagttcactagtc

SEQ ID NO: 2004 - DNA, 20 bp, synthetic construct
  source 1..20: mol_type = other DNA
ctcctaattatcatgcaagc

SEQ ID NO: 2005 - DNA, 20 bp, synthetic construct
  source 1..20: mol_type = other DNA
tatcttgtacggacttagtc

SEQ ID NO: 2006 - DNA, 20 bp, synthetic construct
  source 1..20: mol_type = other DNA
ctctcacaacctgtaggatc

SEQ ID NO: 2007 - DNA, 20 bp, synthetic construct
  source 1..20: mol_type = other DNA
accgtcttaatcgcaataga

SEQ ID NO: 2008 - DNA, 20 bp, synthetic construct
  source 1..20: mol_type = other DNA
cgctgaccgtaagctgaggg

SEQ ID NO: 2009 - DNA, 20 bp, synthetic construct
  source 1..20: mol_type = other DNA
ttacaagtaggatgagaccc

SEQ ID NO: 2010 - DNA, 20 bp, synthetic construct
  source 1..20: mol_type = other DNA
gcgatccttcctgttaggcc

SEQ ID NO: 2011 - DNA, 20 bp, synthetic construct
  source 1..20: mol_type = other DNA
cactgctgcaccccatacaa

SEQ ID NO: 2012 - DNA, 20 bp, synthetic construct
  source 1..20: mol_type = other DNA
cctgcatacggcgatgtggg

SEQ ID NO: 2013 - DNA, 20 bp, synthetic construct
  source 1..20: mol_type = other DNA
cttcctattgcaagaccgca

SEQ ID NO: 2014 - DNA, 20 bp, synthetic construct
  source 1..20: mol_type = other DNA
cccggaggtgtctagggaat

SEQ ID NO: 2015 - DNA, 20 bp, synthetic construct
  source 1..20: mol_type = other DNA
gtcgaattcatcctcccagt

SEQ ID NO: 2016 - DNA, 20 bp, synthetic construct
  source 1..20: mol_type = other DNA
ctcacgccctgctccgtgta

SEQ ID NO: 2017 - DNA, 20 bp, synthetic construct
  source 1..20: mol_type = other DNA
cgccgggcacgacacaggca

SEQ ID NO: 2018 - DNA, 20 bp, synthetic construct
  source 1..20: mol_type = other DNA
gttgtagaagtccacggcac

SEQ ID NO: 2019 - DNA, 20 bp, synthetic construct
  source 1..20: mol_type = other DNA
tgctgtgcctcgatggcggt

SEQ ID NO: 2020 - DNA, 20 bp, synthetic construct
  source 1..20: mol_type = other DNA
gttggagaactcatagcggc

SEQ ID NO: 2021 - DNA, 20 bp, synthetic construct
  source 1..20: mol_type = other DNA
tgttggtccgcgctggcatg

SEQ ID NO: 2022 - DNA, 20 bp, synthetic construct
  source 1..20: mol_type = other DNA
agcatattgtgggtgcacac

SEQ ID NO: 2023 - DNA, 20 bp, synthetic construct
  source 1..20: mol_type = other DNA
tcggcactgctattgaagag

SEQ ID NO: 2024 - DNA, 20 bp, synthetic construct
  source 1..20: mol_type = other DNA
cggagagattggtggagata

SEQ ID NO: 2025 - DNA, 20 bp, synthetic construct
  source 1..20: mol_type = other DNA
atgatacgctgccgccggct

SEQ ID NO: 2026 - DNA, 20 bp, synthetic construct
  source 1..20: mol_type = other DNA
cgtgggtagcggtacccctg

SEQ ID NO: 2027 - DNA, 20 bp, synthetic construct
  source 1..20: mol_type = other DNA
ttgcgccggtccttggcggc

SEQ ID NO: 2028 - DNA, 20 bp, synthetic construct
  source 1..20: mol_type = other DNA
ccacagagttgcgcttgctg

SEQ ID NO: 2029 - DNA, 20 bp, synthetic construct
  source 1..20: mol_type = other DNA
aaaggcacggctttgtggat

SEQ ID NO: 2030 - DNA, 20 bp, synthetic construct
  source 1..20: mol_type = other DNA
tggtggcccgcatgccgggc

SEQ ID NO: 2031 - DNA, 20 bp, synthetic construct
  source 1..20: mol_type = other DNA
gaaagtgccccggctctgga

SEQ ID NO: 2032 - DNA, 20 bp, synthetic construct
  source 1..20: mol_type = other DNA
aatgagcagccaagtggttc

SEQ ID NO: 2033 - DNA, 20 bp, synthetic construct
  source 1..20: mol_type = other DNA
aagagcctcgaggtaaatgt

SEQ ID NO: 2034 - DNA, 20 bp, synthetic construct
  source 1..20: mol_type = other DNA
gggcccccatccactactgt

SEQ ID NO: 2035 - DNA, 20 bp, synthetic construct
  source 1..20: mol_type = other DNA
acaagggttcccctagtagc

SEQ ID NO: 2036 - DNA, 20 bp, synthetic construct
  source 1..20: mol_type = other DNA
ggacccaggtatctagtctc

SEQ ID NO: 2037 - DNA, 20 bp, synthetic construct
  source 1..20: mol_type = other DNA
tagggtcataggtctgaaac

SEQ ID NO: 2038 - DNA, 20 bp, synthetic construct
  source 1..20: mol_type = other DNA
agcccgtcccatctttattc

SEQ ID NO: 2039 - DNA, 20 bp, synthetic construct
  source 1..20: mol_type = other DNA
cctattccagtacgcatgtg

SEQ ID NO: 2040 - DNA, 20 bp, synthetic construct
  source 1..20: mol_type = other DNA
aggccctggcgatacccggc

SEQ ID NO: 2041 - DNA, 20 bp, synthetic construct
  source 1..20: mol_type = other DNA
actgactacccggactcagg

SEQ ID NO: 2042 - DNA, 20 bp, synthetic construct
  source 1..20: mol_type = other DNA
ccccggccgaggtccatagt

SEQ ID NO: 2043 - DNA, 20 bp, synthetic construct
  source 1..20: mol_type = other DNA
gcccatgtctgggatccacc

SEQ ID NO: 2044 - DNA, 20 bp, synthetic construct
  source 1..20: mol_type = other DNA
gctattagcatgtccattag

SEQ ID NO: 2045 - DNA, 20 bp, synthetic construct
  source 1..20: mol_type = other DNA
ccgatattccatgcttctct

SEQ ID NO: 2046 - DNA, 20 bp, synthetic construct
  source 1..20: mol_type = other DNA
cttagggacacagtcggacc

SEQ ID NO: 2047 - DNA, 20 bp, synthetic construct
  source 1..20: mol_type = other DNA
cccgctcctcgccgacctgg

SEQ ID NO: 2048 - DNA, 20 bp, synthetic construct
  source 1..20: mol_type = other DNA
gtcacctgcgacctctttcc

SEQ ID NO: 2049 - DNA, 20 bp, synthetic construct
  source 1..20: mol_type = other DNA
ccgtgccccctgcttacttt

SEQ ID NO: 2050 - DNA, 20 bp, synthetic construct
  source 1..20: mol_type = other DNA
actcatccgtggttctccca

SEQ ID NO: 2051 - DNA, 20 bp, synthetic construct
  source 1..20: mol_type = other DNA
gccagagctaatccttggat

SEQ ID NO: 2052 - DNA, 20 bp, synthetic construct
  source 1..20: mol_type = other DNA
ctcactttgaggctgattcc

SEQ ID NO: 2053 - DNA, 20 bp, synthetic construct
  source 1..20: mol_type = other DNA
cagaatgccataggagcagc

SEQ ID NO: 2054 - DNA, 20 bp, synthetic construct
  source 1..20: mol_type = other DNA
cagggttagattggacagac

SEQ ID NO: 2055 - DNA, 20 bp, synthetic construct
  source 1..20: mol_type = other DNA
caaccggacagggacctgta

SEQ ID NO: 2056 - DNA, 20 bp, synthetic construct
  source 1..20: mol_type = other DNA
tccccagtagggacaaggac

SEQ ID NO: 2057 - DNA, 20 bp, synthetic construct
  source 1..20: mol_type = other DNA
tactcgcagtcccccatctg

SEQ ID NO: 2058 - DNA, 20 bp, synthetic construct
  source 1..20: mol_type = other DNA
caactggctttggcatagac

SEQ ID NO: 2059 - DNA, 20 bp, synthetic construct
  source 1..20: mol_type = other DNA
tggtaactgatggtccccag

SEQ ID NO: 2060 - DNA, 20 bp, synthetic construct
  source 1..20: mol_type = other DNA
atactcactgagaacggata

SEQ ID NO: 2061 - DNA, 20 bp, synthetic construct
  source 1..20: mol_type = other DNA
ctaggatatatcctctactt

SEQ ID NO: 2062 - DNA, 20 bp, synthetic construct
  source 1..20: mol_type = other DNA
gatcaatgttgtggttgaat

SEQ ID NO: 2063 - DNA, 20 bp, synthetic construct
  source 1..20: mol_type = other DNA
ttaaggaggccgaataccca

SEQ ID NO: 2064 - DNA, 20 bp, synthetic construct
  source 1..20: mol_type = other DNA
cccacaaggcacggtaaagc

SEQ ID NO: 2065 - DNA, 20 bp, synthetic construct
  source 1..20: mol_type = other DNA
accactgggatcctgccata

SEQ ID NO: 2066 - DNA, 20 bp, synthetic construct
  source 1..20: mol_type = other DNA
cgtctcatattccagttctg

SEQ ID NO: 2067 - DNA, 20 bp, synthetic construct
  source 1..20: mol_type = other DNA
cgcaatctcggccactttct

SEQ ID NO: 2068 - DNA, 20 bp, synthetic construct
  source 1..20: mol_type = other DNA
cagctattattaggacttgt

SEQ ID NO: 2069 - DNA, 20 bp, synthetic construct
  source 1..20: mol_type = other DNA
agctacccttaggtttctag

SEQ ID NO: 2070 - DNA, 20 bp, synthetic construct
  source 1..20: mol_type = other DNA
catgcatgtgagaacggagt

SEQ ID NO: 2071 - DNA, 20 bp, synthetic construct
  source 1..20: mol_type = other DNA
gcaactgaagttgcacgagt

SEQ ID NO: 2072 - DNA, 20 bp, synthetic construct
  source 1..20: mol_type = other DNA
tggagccgtgtgcagcaagg

SEQ ID NO: 2073 - DNA, 20 bp, synthetic construct
  source 1..20: mol_type = other DNA
tgaagttagggatctaaagc

SEQ ID NO: 2074 - DNA, 20 bp, synthetic construct
  source 1..20: mol_type = other DNA
aagtactgaagtccctggac

SEQ ID NO: 2075 - DNA, 20 bp, synthetic construct
  source 1..20: mol_type = other DNA
acattcataatgaggtgggc

SEQ ID NO: 2076 - DNA, 20 bp, synthetic construct
  source 1..20: mol_type = other DNA
acagagctagtgtgatagga

SEQ ID NO: 2077 - DNA, 20 bp, synthetic construct
  source 1..20: mol_type = other DNA
catgagccatgcggaccctg

SEQ ID NO: 2078 - DNA, 20 bp, synthetic construct
  source 1..20: mol_type = other DNA
ctacactcacccggtgtgta

SEQ ID NO: 2079 - DNA, 20 bp, synthetic construct
  source 1..20: mol_type = other DNA
ctcgccccaagacatgctag

SEQ ID NO: 2080 - DNA, 20 bp, synthetic construct
  source 1..20: mol_type = other DNA
gtgacatccagttcactagt

SEQ ID NO: 2081 - DNA, 20 bp, synthetic construct
  source 1..20: mol_type = other DNA
gcgactcctaattatcatgc

SEQ ID NO: 2082 - DNA, 20 bp, synthetic construct
  source 1..20: mol_type = other DNA
gtatcttgtacggacttagt

SEQ ID NO: 2083 - DNA, 20 bp, synthetic construct
  source 1..20: mol_type = other DNA
taactctcacaacctgtagg

SEQ ID NO: 2084 - DNA, 20 bp, synthetic construct
  source 1..20: mol_type = other DNA
taccgtcttaatcgcaatag

SEQ ID NO: 2085 - DNA, 20 bp, synthetic construct
  source 1..20: mol_type = other DNA
ccaagggtgcaagctcctcc

SEQ ID NO: 2086 - DNA, 20 bp, synthetic construct
  source 1..20: mol_type = other DNA
gttacaagtaggatgagacc

SEQ ID NO: 2087 - DNA, 20 bp, synthetic construct
  source 1..20: mol_type = other DNA
atgcgatccttcctgttagg

SEQ ID NO: 2088 - DNA, 20 bp, synthetic construct
  source 1..20: mol_type = other DNA
caccctttatgcagatgagc

SEQ ID NO: 2089 - DNA, 20 bp, synthetic construct
  source 1..20: mol_type = other DNA
gcctgcatacggcgatgtgg

SEQ ID NO: 2090 - DNA, 20 bp, synthetic construct
  source 1..20: mol_type = other DNA
ggcttcctattgcaagaccg

SEQ ID NO: 2091 - DNA, 20 bp, synthetic construct
  source 1..20: mol_type = other DNA
accccggaggtgtctaggga

SEQ ID NO: 2092 - DNA, 20 bp, synthetic construct
  source 1..20: mol_type = other DNA
ggtcgaattcatcctcccag

SEQ ID NO: 2093 - DNA, 20 bp, synthetic construct
  source 1..20: mol_type = other DNA
gtcctcacgccctgctccgt

SEQ ID NO: 2094 - DNA, 20 bp, synthetic construct
  source 1..20: mol_type = other DNA
gtcgccgggcacgacacagg

SEQ ID NO: 2095 - DNA, 20 bp, synthetic construct
  source 1..20: mol_type = other DNA
tgttgtagaagtccacggca

SEQ ID NO: 2096 - DNA, 20 bp, synthetic construct
  source 1..20: mol_type = other DNA
caagtgctgtgcctcgatgg

SEQ ID NO: 2097 - DNA, 20 bp, synthetic construct
  source 1..20: mol_type = other DNA
ttgttggagaactcatagcg

SEQ ID NO: 2098 - DNA, 20 bp, synthetic construct
  source 1..20: mol_type = other DNA
ttgttggtccgcgctggcat

SEQ ID NO: 2099 - DNA, 20 bp, synthetic construct
  source 1..20: mol_type = other DNA
tccagcatattgtgggtgca

SEQ ID NO: 2100 - DNA, 20 bp, synthetic construct
  source 1..20: mol_type = other DNA
gtcggcactgctattgaaga

SEQ ID NO: 2101 - DNA, 20 bp, synthetic construct
  source 1..20: mol_type = other DNA
ccggagagattggtggagat

SEQ ID NO: 2102 - DNA, 20 bp, synthetic construct
  source 1..20: mol_type = other DNA
gatgatacgctgccgccggc

SEQ ID NO: 2103 - DNA, 20 bp, synthetic construct
  source 1..20: mol_type = other DNA
ccgtgggtagcggtacccct

SEQ ID NO: 2104 - DNA, 20 bp, synthetic construct
  source 1..20: mol_type = other DNA
gttgcgccggtccttggcgg

SEQ ID NO: 2105 - DNA, 20 bp, synthetic construct
  source 1..20: mol_type = other DNA
tccacagagttgcgcttgct

SEQ ID NO: 2106 - DNA, 20 bp, synthetic construct
  source 1..20: mol_type = other DNA
gaaaggcacggctttgtgga

SEQ ID NO: 2107 - DNA, 20 bp, synthetic construct
  source 1..20: mol_type = other DNA
ttggtggcccgcatgccggg

SEQ ID NO: 2108 - DNA, 20 bp, synthetic construct
  source 1..20: mol_type = other DNA
ctgaaagtgccccggctctg

SEQ ID NO: 2109 - DNA, 20 bp, synthetic construct
  source 1..20: mol_type = other DNA
gaagagtaggatctggtcca

SEQ ID NO: 2110 - DNA, 20 bp, synthetic construct
  source 1..20: mol_type = other DNA
gaagagcctcgaggtaaatg

SEQ ID NO: 2111 - DNA, 20 bp, synthetic construct
  source 1..20: mol_type = other DNA
cgggcccccatccactactg

SEQ ID NO: 2112 - DNA, 20 bp, synthetic construct
  source 1..20: mol_type = other DNA
cacaagggttcccctagtag

SEQ ID NO: 2113 - DNA, 20 bp, synthetic construct
  source 1..20: mol_type = other DNA
aggacccaggtatctagtct

SEQ ID NO: 2114 - DNA, 20 bp, synthetic construct
  source 1..20: mol_type = other DNA
gttagggtcataggtctgaa

SEQ ID NO: 2115 - DNA, 20 bp, synthetic construct
  source 1..20: mol_type = other DNA
cagcccgtcccatctttatt

SEQ ID NO: 2116 - DNA, 20 bp, synthetic construct
  source 1..20: mol_type = other DNA
ccctattccagtacgcatgt

SEQ ID NO: 2117 - DNA, 20 bp, synthetic construct
  source 1..20: mol_type = other DNA
caggccctggcgatacccgg

SEQ ID NO: 2118 - DNA, 20 bp, synthetic construct
  source 1..20: mol_type = other DNA
gactgactacccggactcag

SEQ ID NO: 2119 - DNA, 20 bp, synthetic construct
  source 1..20: mol_type = other DNA
gccccggccgaggtccatag

SEQ ID NO: 2120 - DNA, 20 bp, synthetic construct
  source 1..20: mol_type = other DNA
tcgcccatgtctgggatcca

SEQ ID NO: 2121 - DNA, 20 bp, synthetic construct
  source 1..20: mol_type = other DNA
cgctattagcatgtccatta

SEQ ID NO: 2122 - DNA, 20 bp, synthetic construct
  source 1..20: mol_type = other DNA
cccgatattccatgcttctc

SEQ ID NO: 2123 - DNA, 20 bp, synthetic construct
  source 1..20: mol_type = other DNA
ccttagggacacagtcggac

SEQ ID NO: 2124 - DNA, 20 bp, synthetic construct
  source 1..20: mol_type = other DNA
agtggagaagcagccccgct

SEQ ID NO: 2125 - DNA, 20 bp, synthetic construct
  source 1..20: mol_type = other DNA
catatctgtcacctgcgacc

SEQ ID NO: 2126 - DNA, 20 bp, synthetic construct
  source 1..20: mol_type = other DNA
tccgtgccccctgcttactt

SEQ ID NO: 2127 - DNA, 20 bp, synthetic construct
  source 1..20: mol_type = other DNA
tcactcatccgtggttctcc

SEQ ID NO: 2128 - DNA, 20 bp, synthetic construct
  source 1..20: mol_type = other DNA
ggccagagctaatccttgga

SEQ ID NO: 2129 - DNA, 20 bp, synthetic construct
  source 1..20: mol_type = other DNA
cgccagcctcactttgaggc

SEQ ID NO: 2130 - DNA, 20 bp, synthetic construct
  source 1..20: mol_type = other DNA
ggcaaagggactacaactcc

SEQ ID NO: 2131 - DNA, 20 bp, synthetic construct
  source 1..20: mol_type = other DNA
gcagggttagattggacaga

SEQ ID NO: 2132 - DNA, 20 bp, synthetic construct
  source 1..20: mol_type = other DNA
ccaaccggacagggacctgt

SEQ ID NO: 2133 - DNA, 20 bp, synthetic construct
  source 1..20: mol_type = other DNA
atcggcaatccccagtaggg

SEQ ID NO: 2134 - DNA, 20 bp, synthetic construct
  source 1..20: mol_type = other DNA
atactcgcagtcccccatct

SEQ ID NO: 2135 - DNA, 20 bp, synthetic construct
  source 1..20: mol_type = other DNA
gcaactggctttggcataga

SEQ ID NO: 2136 - DNA, 20 bp, synthetic construct
  source 1..20: mol_type = other DNA
aatggtaactgatggtcccc

SEQ ID NO: 2137 - DNA, 20 bp, synthetic construct
  source 1..20: mol_type = other DNA
tatactcactgagaacggat

SEQ ID NO: 2138 - DNA, 20 bp, synthetic construct
  source 1..20: mol_type = other DNA
tcctaggatatatcctctac

SEQ ID NO: 2139 - DNA, 20 bp, synthetic construct
  source 1..20: mol_type = other DNA
gttcattcagatcaatgttg

SEQ ID NO: 2140 - DNA, 20 bp, synthetic construct
  source 1..20: mol_type = other DNA
attaaggaggccgaataccc

SEQ ID NO: 2141 - DNA, 20 bp, synthetic construct
  source 1..20: mol_type = other DNA
acccacaaggcacggtaaag

SEQ ID NO: 2142 - DNA, 20 bp, synthetic construct
  source 1..20: mol_type = other DNA
gtcaagaccactgggatcct

SEQ ID NO: 2143 - DNA, 20 bp, synthetic construct
  source 1..20: mol_type = other DNA
cccgtctcatattccagttc

SEQ ID NO: 2144 - DNA, 20 bp, synthetic construct
  source 1..20: mol_type = other DNA
acggtcactcctccacttaa

SEQ ID NO: 2145 - DNA, 20 bp, synthetic construct
  source 1..20: mol_type = other DNA
gtacacatggcaagccttcc

SEQ ID NO: 2146 - DNA, 20 bp, synthetic construct
  source 1..20: mol_type = other DNA
cagctacccttaggtttcta

SEQ ID NO: 2147 - DNA, 20 bp, synthetic construct
  source 1..20: mol_type = other DNA
gcatgcatgtgagaacggag

SEQ ID NO: 2148 - DNA, 20 bp, synthetic construct
  source 1..20: mol_type = other DNA
agcaactgaagttgcacgag

SEQ ID NO: 2149 - DNA, 20 bp, synthetic construct
  source 1..20: mol_type = other DNA
gtggagccgtgtgcagcaag

SEQ ID NO: 2150 - DNA, 20 bp, synthetic construct
  source 1..20: mol_type = other DNA
gaatgacggtaagttctcat

SEQ ID NO: 2151 - DNA, 20 bp, synthetic construct
  source 1..20: mol_type = other DNA
accacaagtactgaagtccc

SEQ ID NO: 2152 - DNA, 20 bp, synthetic construct
  source 1..20: mol_type = other DNA
cgatggcagaaacattcata

SEQ ID NO: 2153 - DNA, 20 bp, synthetic construct
  source 1..20: mol_type = other DNA
gacagagctagtgtgatagg

SEQ ID NO: 2154 - DNA, 20 bp, synthetic construct
  source 1..20: mol_type = other DNA
tcatgagccatgcggaccct

SEQ ID NO: 2155 - DNA, 20 bp, synthetic construct
  source 1..20: mol_type = other DNA
actacactcacccggtgtgt

SEQ ID NO: 2156 - DNA, 20 bp, synthetic construct
  source 1..20: mol_type = other DNA
cctcgccccaagacatgcta

SEQ ID NO: 2157 - DNA, 20 bp, synthetic construct
  source 1..20: mol_type = other DNA
tgtgacatccagttcactag

SEQ ID NO: 2158 - DNA, 20 bp, synthetic construct
  source 1..20: mol_type = other DNA
cgcgactcctaattatcatg

SEQ ID NO: 2159 - DNA, 20 bp, synthetic construct
  source 1..20: mol_type = other DNA
agtatcttgtacggacttag

SEQ ID NO: 2160 - DNA, 20 bp, synthetic construct
  source 1..20: mol_type = other DNA
gtccatagttgggagataag

SEQ ID NO: 2161 - DNA, 20 bp, synthetic construct
  source 1..20: mol_type = other DNA
ctaccgtcttaatcgcaata

SEQ ID NO: 2162 - DNA, 20 bp, synthetic construct
  source 1..20: mol_type = other DNA
tccaagggtgcaagctcctc

SEQ ID NO: 2163 - DNA, 20 bp, synthetic construct
  source 1..20: mol_type = other DNA
tgttacaagtaggatgagac

SEQ ID NO: 2164 - DNA, 20 bp, synthetic construct
  source 1..20: mol_type = other DNA
catgcgatccttcctgttag

SEQ ID NO: 2165 - DNA, 20 bp, synthetic construct
  source 1..20: mol_type = other DNA
gccacaccctttatgcagat

SEQ ID NO: 2166 - DNA, 20 bp, synthetic construct
  source 1..20: mol_type = other DNA
ggcctgcatacggcgatgtg

SEQ ID NO: 2167 - DNA, 20 bp, synthetic construct
  source 1..20: mol_type = other DNA
cggcttcctattgcaagacc

SEQ ID NO: 2168 - DNA, 20 bp, synthetic construct
  source 1..20: mol_type = other DNA
gaccccggaggtgtctaggg

SEQ ID NO: 2169 - DNA, 20 bp, synthetic construct
  source 1..20: mol_type = other DNA
tccaggtcgaattcatcctc

SEQ ID NO: 2170 - DNA, 20 bp, synthetic construct
  source 1..20: mol_type = other DNA
tgttcatggaatccagtgtc

SEQ ID NO: 2171 - DNA, 20 bp, synthetic construct
  source 1..20: mol_type = other DNA
agtcgccgggcacgacacag

SEQ ID NO: 2172 - DNA, 20 bp, synthetic construct
  source 1..20: mol_type = other DNA
ttgttgtagaagtccacggc

SEQ ID NO: 2173 - DNA, 20 bp, synthetic construct
  source 1..20: mol_type = other DNA
gcaagtgctgtgcctcgatg

SEQ ID NO: 2174 - DNA, 20 bp, synthetic construct
  source 1..20: mol_type = other DNA
agttgagccgagccaatgcc

SEQ ID NO: 2175 - DNA, 20 bp, synthetic construct
  source 1..20: mol_type = other DNA
attgttggtccgcgctggca

SEQ ID NO: 2176 - DNA, 20 bp, synthetic construct
  source 1..20: mol_type = other DNA
atccagcatattgtgggtgc

SEQ ID NO: 2177 - DNA, 20 bp, synthetic construct
  source 1..20: mol_type = other DNA
tgtcggcactgctattgaag

SEQ ID NO: 2178 - DNA, 20 bp, synthetic construct
  source 1..20: mol_type = other DNA
tccatgaagcagccgaagcc

SEQ ID NO: 2179 - DNA, 20 bp, synthetic construct
  source 1..20: mol_type = other DNA
ggatgatacgctgccgccgg

SEQ ID NO: 2180 - DNA, 20 bp, synthetic construct
  source 1..20: mol_type = other DNA
ggccgtgggtagcggtaccc

SEQ ID NO: 2181 - DNA, 20 bp, synthetic construct
  source 1..20: mol_type = other DNA
tgttgcgccggtccttggcg

SEQ ID NO: 2182 - DNA, 20 bp, synthetic construct
  source 1..20: mol_type = other DNA
tgtccacagagttgcgcttg

SEQ ID NO: 2183 - DNA, 20 bp, synthetic construct
  source 1..20: mol_type = other DNA
agaaaggcacggctttgtgg

SEQ ID NO: 2184 - DNA, 20 bp, synthetic construct
  source 1..20: mol_type = other DNA
acttggtggcccgcatgccg

SEQ ID NO: 2185 - DNA, 20 bp, synthetic construct
  source 1..20: mol_type = other DNA
tctgaaagtgccccggctct

SEQ ID NO: 2186 - DNA, 20 bp, synthetic construct
  source 1..20: mol_type = other DNA
gattccctggagggagatct

SEQ ID NO: 2187 - DNA, 20 bp, synthetic construct
  source 1..20: mol_type = other DNA
ggaagagcctcgaggtaaat

SEQ ID NO: 2188 - DNA, 20 bp, synthetic construct
  source 1..20: mol_type = other DNA
tccgggcccccatccactac

SEQ ID NO: 2189 - DNA, 20 bp, synthetic construct
  source 1..20: mol_type = other DNA
tcacaagggttcccctagta

SEQ ID NO: 2190 - DNA, 20 bp, synthetic construct
  source 1..20: mol_type = other DNA
tcaggacccaggtatctagt

SEQ ID NO: 2191 - DNA, 20 bp, synthetic construct
  source 1..20: mol_type = other DNA
ctgttagggtcataggtctg

SEQ ID NO: 2192 - DNA, 20 bp, synthetic construct
  source 1..20: mol_type = other DNA
ccagcccgtcccatctttat

SEQ ID NO: 2193 - DNA, 20 bp, synthetic construct
  source 1..20: mol_type = other DNA
cccctattccagtacgcatg

SEQ ID NO: 2194 - DNA, 20 bp, synthetic construct
  source 1..20: mol_type = other DNA
ccaggccctggcgatacccg

SEQ ID NO: 2195 - DNA, 20 bp, synthetic construct
  source 1..20: mol_type = other DNA
ggactgactacccggactca

SEQ ID NO: 2196 - DNA, 20 bp, synthetic construct
  source 1..20: mol_type = other DNA
ggccccggccgaggtccata

SEQ ID NO: 2197 - DNA, 20 bp, synthetic construct
  source 1..20: mol_type = other DNA
ttcgcccatgtctgggatcc

SEQ ID NO: 2198 - DNA, 20 bp, synthetic construct
  source 1..20: mol_type = other DNA
acgctattagcatgtccatt

SEQ ID NO: 2199 - DNA, 20 bp, synthetic construct
  source 1..20: mol_type = other DNA
ttccccgatattccatgctt

SEQ ID NO: 2200 - DNA, 20 bp, synthetic construct
  source 1..20: mol_type = other DNA
tcccttagggacacagtcgg

SEQ ID NO: 2201 - DNA, 20 bp, synthetic construct
  source 1..20: mol_type = other DNA
cgtgtttctaagacttgctg

SEQ ID NO: 2202 - DNA, 20 bp, synthetic construct
  source 1..20: mol_type = other DNA
acatatctgtcacctgcgac

SEQ ID NO: 2203 - DNA, 20 bp, synthetic construct
  source 1..20: mol_type = other DNA
tttccgtgccccctgcttac

SEQ ID NO: 2204 - DNA, 20 bp, synthetic construct
  source 1..20: mol_type = other DNA
cttcactcatccgtggttct

SEQ ID NO: 2205 - DNA, 20 bp, synthetic construct
  source 1..20: mol_type = other DNA
aggccagagctaatccttgg

SEQ ID NO: 2206 - DNA, 20 bp, synthetic construct
  source 1..20: mol_type = other DNA
gcccgccagcctcactttga

SEQ ID NO: 2207 - DNA, 20 bp, synthetic construct
  source 1..20: mol_type = other DNA
aacattggcaaagggactac

SEQ ID NO: 2208 - DNA, 20 bp, synthetic construct
  source 1..20: mol_type = other DNA
ggcagggttagattggacag

SEQ ID NO: 2209 - DNA, 20 bp, synthetic construct
  source 1..20: mol_type = other DNA
cccaaccggacagggacctg

SEQ ID NO: 2210 - DNA, 20 bp, synthetic construct
  source 1..20: mol_type = other DNA
aatcggcaatccccagtagg

SEQ ID NO: 2211 - DNA, 20 bp, synthetic construct
  source 1..20: mol_type = other DNA
catactcgcagtcccccatc

SEQ ID NO: 2212 - DNA, 20 bp, synthetic construct
  source 1..20: mol_type = other DNA
agcaactggctttggcatag

SEQ ID NO: 2213 - DNA, 20 bp, synthetic construct
  source 1..20: mol_type = other DNA
aaatggtaactgatggtccc

SEQ ID NO: 2214 - DNA, 20 bp, synthetic construct
  source 1..20: mol_type = other DNA
ttatactcactgagaacgga

SEQ ID NO: 2215 - DNA, 20 bp, synthetic construct
  source 1..20: mol_type = other DNA
gcttctcctaggatatatcc

SEQ ID NO: 2216 - DNA, 20 bp, synthetic construct
  source 1..20: mol_type = other DNA
gtgagggtcccatgttttat

SEQ ID NO: 2217 - DNA, 20 bp, synthetic construct
  source 1..20: mol_type = other DNA
aattaaggaggccgaatacc

SEQ ID NO: 2218 - DNA, 20 bp, synthetic construct
  source 1..20: mol_type = other DNA
aacccacaaggcacggtaaa

SEQ ID NO: 2219 - DNA, 20 bp, synthetic construct
  source 1..20: mol_type = other DNA
cgttcacctgcgcagaaaga

SEQ ID NO: 2220 - DNA, 20 bp, synthetic construct
  source 1..20: mol_type = other DNA
ccccgtctcatattccagtt

SEQ ID NO: 2221 - DNA, 20 bp, synthetic construct
  source 1..20: mol_type = other DNA
cacggtcactcctccactta

SEQ ID NO: 2222 - DNA, 20 bp, synthetic construct
  source 1..20: mol_type = other DNA
agtacacatggcaagccttc

SEQ ID NO: 2223 - DNA, 20 bp, synthetic construct
  source 1..20: mol_type = other DNA
cccagctacccttaggtttc

SEQ ID NO: 2224 - DNA, 20 bp, synthetic construct
  source 1..20: mol_type = other DNA
ggcatgcatgtgagaacgga

SEQ ID NO: 2225 - DNA, 20 bp, synthetic construct
  source 1..20: mol_type = other DNA
cagcaactgaagttgcacga

SEQ ID NO: 2226 - DNA, 20 bp, synthetic construct
  source 1..20: mol_type = other DNA
ggtggagccgtgtgcagcaa

SEQ ID NO: 2227 - DNA, 20 bp, synthetic construct
  source 1..20: mol_type = other DNA
agaatgacggtaagttctca

SEQ ID NO: 2228 - DNA, 20 bp, synthetic construct
  source 1..20: mol_type = other DNA
gaccacaagtactgaagtcc

SEQ ID NO: 2229 - DNA, 20 bp, synthetic construct
  source 1..20: mol_type = other DNA
ccgatggcagaaacattcat

SEQ ID NO: 2230 - DNA, 20 bp, synthetic construct
  source 1..20: mol_type = other DNA
tccaaccctaacaaaggccc

SEQ ID NO: 2231 - DNA, 20 bp, synthetic construct
  source 1..20: mol_type = other DNA
ctcatgagccatgcggaccc

SEQ ID NO: 2232 - DNA, 20 bp, synthetic construct
  source 1..20: mol_type = other DNA
cactacactcacccggtgtg

SEQ ID NO: 2233 - DNA, 20 bp, synthetic construct
  source 1..20: mol_type = other DNA
agtgcctcgccccaagacat

SEQ ID NO: 2234 - DNA, 20 bp, synthetic construct
  source 1..20: mol_type = other DNA
gtgaactgtgacatccagtt

SEQ ID NO: 2235 - DNA, 20 bp, synthetic construct
  source 1..20: mol_type = other DNA
ccgcgactcctaattatcat

SEQ ID NO: 2236 - DNA, 20 bp, synthetic construct
  source 1..20: mol_type = other DNA
cagtatcttgtacggactta

SEQ ID NO: 2237 - DNA, 20 bp, synthetic construct
  source 1..20: mol_type = other DNA
agtccatagttgggagataa

SEQ ID NO: 2238 - DNA, 20 bp, synthetic construct
  source 1..20: mol_type = other DNA
cctaccgtcttaatcgcaat

SEQ ID NO: 2239 - DNA, 20 bp, synthetic construct
  source 1..20: mol_type = other DNA
tctccaagggtgcaagctcc

SEQ ID NO: 2240 - DNA, 20 bp, synthetic construct
  source 1..20: mol_type = other DNA
ctgttacaagtaggatgaga

SEQ ID NO: 2241 - DNA, 20 bp, synthetic construct
  source 1..20: mol_type = other DNA
tcatgcgatccttcctgtta

SEQ ID NO: 2242 - DNA, 20 bp, synthetic construct
  source 1..20: mol_type = other DNA
ttggccacaccctttatgca

SEQ ID NO: 2243 - DNA, 20 bp, synthetic construct
  source 1..20: mol_type = other DNA
gggcctgcatacggcgatgt

SEQ ID NO: 2244 - DNA, 20 bp, synthetic construct
  source 1..20: mol_type = other DNA
tcggcttcctattgcaagac

SEQ ID NO: 2245 - DNA, 20 bp, synthetic construct
  source 1..20: mol_type = other DNA
gggaccccggaggtgtctag

SEQ ID NO: 2246 - DNA, 20 bp, synthetic construct
  source 1..20: mol_type = other DNA
tctccaggtcgaattcatcc

SEQ ID NO: 2247 - DNA, 20 bp, synthetic construct
  source 1..20: mol_type = other DNA
gagggcctccctcgatcagc

SEQ ID NO: 2248 - DNA, 20 bp, synthetic construct
  source 1..20: mol_type = other DNA
cagtcgccgggcacgacaca

SEQ ID NO: 2249 - DNA, 20 bp, synthetic construct
  source 1..20: mol_type = other DNA
ggttgttgtagaagtccacg

SEQ ID NO: 2250 - DNA, 20 bp, synthetic construct
  source 1..20: mol_type = other DNA
agcaagtgctgtgcctcgat

SEQ ID NO: 2251 - DNA, 20 bp, synthetic construct
  source 1..20: mol_type = other DNA
tagttgagccgagccaatgc

SEQ ID NO: 2252 - DNA, 20 bp, synthetic construct
  source 1..20: mol_type = other DNA
aaattgttggtccgcgctgg

SEQ ID NO: 2253 - DNA, 20 bp, synthetic construct
  source 1..20: mol_type = other DNA
catccagcatattgtgggtg

SEQ ID NO: 2254 - DNA, 20 bp, synthetic construct
  source 1..20: mol_type = other DNA
ctgtcggcactgctattgaa

SEQ ID NO: 2255 - DNA, 20 bp, synthetic construct
  source 1..20: mol_type = other DNA
cgatgtgttcctccatgaag

SEQ ID NO: 2256 - DNA, 20 bp, synthetic construct
  source 1..20: mol_type = other DNA
tggatgatacgctgccgccg

SEQ ID NO: 2257 - DNA, 20 bp, synthetic construct
  source 1..20: mol_type = other DNA
tggccgtgggtagcggtacc

SEQ ID NO: 2258 - DNA, 20 bp, synthetic construct
  source 1..20: mol_type = other DNA
atgttgcgccggtccttggc

SEQ ID NO: 2259 - DNA, 20 bp, synthetic construct
  source 1..20: mol_type = other DNA
gtgtccacagagttgcgctt

SEQ ID NO: 2260 - DNA, 20 bp, synthetic construct
  source 1..20: mol_type = other DNA
gagaaaggcacggctttgtg

SEQ ID NO: 2261 - DNA, 20 bp, synthetic construct
  source 1..20: mol_type = other DNA
aacttggtggcccgcatgcc

SEQ ID NO: 2262 - DNA, 20 bp, synthetic construct
  source 1..20: mol_type = other DNA
actctgaaagtgccccggct

SEQ ID NO: 2263 - DNA, 20 bp, synthetic construct
  source 1..20: mol_type = other DNA
aggcggattccctggaggga

SEQ ID NO: 2264 - DNA, 20 bp, synthetic construct
  source 1..20: mol_type = other DNA
tggaagagcctcgaggtaaa

SEQ ID NO: 2265 - DNA, 20 bp, synthetic construct
  source 1..20: mol_type = other DNA
ttccgggcccccatccacta

SEQ ID NO: 2266 - DNA, 20 bp, synthetic construct
  source 1..20: mol_type = other DNA
gtcacaagggttcccctagt

SEQ ID NO: 2267 - DNA, 20 bp, synthetic construct
  source 1..20: mol_type = other DNA
ctgttcaggacccaggtatc

SEQ ID NO: 2268 - DNA, 20 bp, synthetic construct
  source 1..20: mol_type = other DNA
gctgttagggtcataggtct

SEQ ID NO: 2269 - DNA, 20 bp, synthetic construct
  source 1..20: mol_type = other DNA
tccagcccgtcccatcttta

SEQ ID NO: 2270 - DNA, 20 bp, synthetic construct
  source 1..20: mol_type = other DNA
tcccctattccagtacgcat

SEQ ID NO: 2271 - DNA, 20 bp, synthetic construct
  source 1..20: mol_type = other DNA
tgactagggacaccagcatg

SEQ ID NO: 2272 - DNA, 20 bp, synthetic construct
  source 1..20: mol_type = other DNA
aggactgactacccggactc

SEQ ID NO: 2273 - DNA, 20 bp, synthetic construct
  source 1..20: mol_type = other DNA
cgtgtgagggcaggccccgg

SEQ ID NO: 2274 - DNA, 20 bp, synthetic construct
  source 1..20: mol_type = other DNA
attcgcccatgtctgggatc

SEQ ID NO: 2275 - DNA, 20 bp, synthetic construct
  source 1..20: mol_type = other DNA
caccgctagaaggtagacgc

SEQ ID NO: 2276 - DNA, 20 bp, synthetic construct
  source 1..20: mol_type = other DNA
cttccccgatattccatgct

SEQ ID NO: 2277 - DNA, 20 bp, synthetic construct
  source 1..20: mol_type = other DNA
ttcccttagggacacagtcg

SEQ ID NO: 2278 - DNA, 20 bp, synthetic construct
  source 1..20: mol_type = other DNA
ccgtgtttctaagacttgct

SEQ ID NO: 2279 - DNA, 20 bp, synthetic construct
  source 1..20: mol_type = other DNA
cacatatctgtcacctgcga

SEQ ID NO: 2280 - DNA, 20 bp, synthetic construct
  source 1..20: mol_type = other DNA
ttttccgtgccccctgctta

SEQ ID NO: 2281 - DNA, 20 bp, synthetic construct
  source 1..20: mol_type = other DNA
tcttcactcatccgtggttc

SEQ ID NO: 2282 - DNA, 20 bp, synthetic construct
  source 1..20: mol_type = other DNA
gcccttggatgttcatgtcc

SEQ ID NO: 2283 - DNA, 20 bp, synthetic construct
  source 1..20: mol_type = other DNA
tcgggcaagcccgccagcct

SEQ ID NO: 2284 - DNA, 20 bp, synthetic construct
  source 1..20: mol_type = other DNA
ccaacattggcaaagggact

SEQ ID NO: 2285 - DNA, 20 bp, synthetic construct
  source 1..20: mol_type = other DNA
tggcagggttagattggaca

SEQ ID NO: 2286 - DNA, 20 bp, synthetic construct
  source 1..20: mol_type = other DNA
tcccaaccggacagggacct

SEQ ID NO: 2287 - DNA, 20 bp, synthetic construct
  source 1..20: mol_type = other DNA
gaatcggcaatccccagtag

SEQ ID NO: 2288 - DNA, 20 bp, synthetic construct
  source 1..20: mol_type = other DNA
gcatactcgcagtcccccat

SEQ ID NO: 2289 - DNA, 20 bp, synthetic construct
  source 1..20: mol_type = other DNA
cggtttatgctatttcaact

SEQ ID NO: 2290 - DNA, 20 bp, synthetic construct
  source 1..20: mol_type = other DNA
ggagctgtagttctctattc

SEQ ID NO: 2291 - DNA, 20 bp, synthetic construct
  source 1..20: mol_type = other DNA
cttatactcactgagaacgg

SEQ ID NO: 2292 - DNA, 20 bp, synthetic construct
  source 1..20: mol_type = other DNA
gatctgatccacactggtga

SEQ ID NO: 2293 - DNA, 20 bp, synthetic construct
  source 1..20: mol_type = other DNA
ggtcacaatatctgggattg

SEQ ID NO: 2294 - DNA, 20 bp, synthetic construct
  source 1..20: mol_type = other DNA
gaattaaggaggccgaatac

SEQ ID NO: 2295 - DNA, 20 bp, synthetic construct
  source 1..20: mol_type = other DNA
gaacccacaaggcacggtaa

SEQ ID NO: 2296 - DNA, 20 bp, synthetic construct
  source 1..20: mol_type = other DNA
ccgttcacctgcgcagaaag

SEQ ID NO: 2297 - DNA, 20 bp, synthetic construct
  source 1..20: mol_type = other DNA
accccgtctcatattccagt

SEQ ID NO: 2298 - DNA, 20 bp, synthetic construct
  source 1..20: mol_type = other DNA
aacagccccacggtcactcc

SEQ ID NO: 2299 - DNA, 20 bp, synthetic construct
  source 1..20: mol_type = other DNA
gatgtcatgccaaaaagtac

SEQ ID NO: 2300 - DNA, 20 bp, synthetic construct
  source 1..20: mol_type = other DNA
gcccagctacccttaggttt

SEQ ID NO: 2301 - DNA, 20 bp, synthetic construct
  source 1..20: mol_type = other DNA
gggcatgcatgtgagaacgg

SEQ ID NO: 2302 - DNA, 20 bp, synthetic construct
  source 1..20: mol_type = other DNA
gcctccagcaactgaagttg

SEQ ID NO: 2303 - DNA, 20 bp, synthetic construct
  source 1..20: mol_type = other DNA
aggtggagccgtgtgcagca

SEQ ID NO: 2304 - DNA, 20 bp, synthetic construct
  source 1..20: mol_type = other DNA
tagaatgacggtaagttctc

SEQ ID NO: 2305 - DNA, 20 bp, synthetic construct
  source 1..20: mol_type = other DNA
gtagaccacaagtactgaag

SEQ ID NO: 2306 - DNA, 20 bp, synthetic construct
  source 1..20: mol_type = other DNA
cccgatggcagaaacattca

SEQ ID NO: 2307 - DNA, 20 bp, synthetic construct
  source 1..20: mol_type = other DNA
gcgatgcatccgttttggcc

SEQ ID NO: 2308 - DNA, 20 bp, synthetic construct
  source 1..20: mol_type = other DNA
cctcatgagccatgcggacc

SEQ ID NO: 2309 - DNA, 20 bp, synthetic construct
  source 1..20: mol_type = other DNA
ccactacactcacccggtgt

SEQ ID NO: 2310 - DNA, 20 bp, synthetic construct
  source 1..20: mol_type = other DNA
cagtgcctcgccccaagaca

SEQ ID NO: 2311 - DNA, 20 bp, synthetic construct
  source 1..20: mol_type = other DNA
cagtgtgaactgtgacatcc

SEQ ID NO: 2312 - DNA, 20 bp, synthetic construct
  source 1..20: mol_type = other DNA
gaccgcgactcctaattatc

SEQ ID NO: 2313 - DNA, 20 bp, synthetic construct
  source 1..20: mol_type = other DNA
ccagtatcttgtacggactt

SEQ ID NO: 2314 - DNA, 20 bp, synthetic construct
  source 1..20: mol_type = other DNA
gaaagtccatagttgggaga

SEQ ID NO: 2315 - DNA, 20 bp, synthetic construct
  source 1..20: mol_type = other DNA
gcctaccgtcttaatcgcaa

SEQ ID NO: 2316 - DNA, 20 bp, synthetic construct
  source 1..20: mol_type = other DNA
gtctccaagggtgcaagctc

SEQ ID NO: 2317 - DNA, 20 bp, synthetic construct
  source 1..20: mol_type = other DNA
actgttacaagtaggatgag

SEQ ID NO: 2318 - DNA, 20 bp, synthetic construct
  source 1..20: mol_type = other DNA
gcagtgggtttgaacaaggc

SEQ ID NO: 2319 - DNA, 20 bp, synthetic construct
  source 1..20: mol_type = other DNA
tcttggccacaccctttatg

SEQ ID NO: 2320 - DNA, 20 bp, synthetic construct
  source 1..20: mol_type = other DNA
tgggcctgcatacggcgatg

SEQ ID NO: 2321 - DNA, 20 bp, synthetic construct
  source 1..20: mol_type = other DNA
ctcggcttcctattgcaaga

SEQ ID NO: 2322 - DNA, 20 bp, synthetic construct
  source 1..20: mol_type = other DNA
agggaccccggaggtgtcta

SEQ ID NO: 2323 - DNA, 20 bp, synthetic construct
  source 1..20: mol_type = other DNA
ttctccaggtcgaattcatc

SEQ ID NO: 2324 - DNA, 20 bp, synthetic construct
  source 1..20: mol_type = other DNA
agagggcctccctcgatcag

SEQ ID NO: 2325 - DNA, 20 bp, synthetic construct
  source 1..20: mol_type = other DNA
gcagtcgccgggcacgacac

SEQ ID NO: 2326 - DNA, 20 bp, synthetic construct
  source 1..20: mol_type = other DNA
ccctttccatgcagtatcgg

SEQ ID NO: 2327 - DNA, 20 bp, synthetic construct
  source 1..20: mol_type = other DNA
gagcaagtgctgtgcctcga

SEQ ID NO: 2328 - DNA, 20 bp, synthetic construct
  source 1..20: mol_type = other DNA
atagttgagccgagccaatg

SEQ ID NO: 2329 - DNA, 20 bp, synthetic construct
  source 1..20: mol_type = other DNA
gaaattgttggtccgcgctg

SEQ ID NO: 2330 - DNA, 20 bp, synthetic construct
  source 1..20: mol_type = other DNA
tcatccagcatattgtgggt

SEQ ID NO: 2331 - DNA, 20 bp, synthetic construct
  source 1..20: mol_type = other DNA
cctgtcggcactgctattga

SEQ ID NO: 2332 - DNA, 20 bp, synthetic construct
  source 1..20: mol_type = other DNA
gcgatgtgttcctccatgaa

SEQ ID NO: 2333 - DNA, 20 bp, synthetic construct
  source 1..20: mol_type = other DNA
ctggatgatacgctgccgcc

SEQ ID NO: 2334 - DNA, 20 bp, synthetic construct
  source 1..20: mol_type = other DNA
ctggccgtgggtagcggtac

SEQ ID NO: 2335 - DNA, 20 bp, synthetic construct
  source 1..20: mol_type = other DNA
gatgttgcgccggtccttgg

SEQ ID NO: 2336 - DNA, 20 bp, synthetic construct
  source 1..20: mol_type = other DNA
ccgtgtccacagagttgcgc

SEQ ID NO: 2337 - DNA, 20 bp, synthetic construct
  source 1..20: mol_type = other DNA
gattatgcatattctggagc

SEQ ID NO: 2338 - DNA, 20 bp, synthetic construct
  source 1..20: mol_type = other DNA
gaacttggtggcccgcatgc

SEQ ID NO: 2339 - DNA, 20 bp, synthetic construct
  source 1..20: mol_type = other DNA
aactctgaaagtgccccggc

SEQ ID NO: 2340 - DNA, 20 bp, synthetic construct
  source 1..20: mol_type = other DNA
caggcggattccctggaggg

SEQ ID NO: 2341 - DNA, 20 bp, synthetic construct
  source 1..20: mol_type = other DNA
atggaagagcctcgaggtaa

SEQ ID NO: 2342 - DNA, 20 bp, synthetic construct
  source 1..20: mol_type = other DNA
agttccgggcccccatccac

SEQ ID NO: 2343 - DNA, 20 bp, synthetic construct
  source 1..20: mol_type = other DNA
ggtcacaagggttcccctag

SEQ ID NO: 2344 - DNA, 20 bp, synthetic construct
  source 1..20: mol_type = other DNA
ccctgttcaggacccaggta

SEQ ID NO: 2345 - DNA, 20 bp, synthetic construct
  source 1..20: mol_type = other DNA
tgctgttagggtcataggtc

SEQ ID NO: 2346 - DNA, 20 bp, synthetic construct
  source 1..20: mol_type = other DNA
ttacagtctccagcccgtcc

SEQ ID NO: 2347 - DNA, 20 bp, synthetic construct
  source 1..20: mol_type = other DNA
ttcccctattccagtacgca

SEQ ID NO: 2348 - DNA, 20 bp, synthetic construct
  source 1..20: mol_type = other DNA
ctgactagggacaccagcat

SEQ ID NO: 2349 - DNA, 20 bp, synthetic construct
  source 1..20: mol_type = other DNA
gaggactgactacccggact

SEQ ID NO: 2350 - DNA, 20 bp, synthetic construct
  source 1..20: mol_type = other DNA
acccactgtgggcccaagcg

SEQ ID NO: 2351 - DNA, 20 bp, synthetic construct
  source 1..20: mol_type = other DNA
cattcgcccatgtctgggat

SEQ ID NO: 2352 - DNA, 20 bp, synthetic construct
  source 1..20: mol_type = other DNA
gcaccgctagaaggtagacg

SEQ ID NO: 2353 - DNA, 20 bp, synthetic construct
  source 1..20: mol_type = other DNA
tcttccccgatattccatgc

SEQ ID NO: 2354 - DNA, 20 bp, synthetic construct
  source 1..20: mol_type = other DNA
gttcccttagggacacagtc

SEQ ID NO: 2355 - DNA, 20 bp, synthetic construct
  source 1..20: mol_type = other DNA
gccgtgtttctaagacttgc

SEQ ID NO: 2356 - DNA, 20 bp, synthetic construct
  source 1..20: mol_type = other DNA
tcacatatctgtcacctgcg

SEQ ID NO: 2357 - DNA, 20 bp, synthetic construct
  source 1..20: mol_type = other DNA
attttccgtgccccctgctt

SEQ ID NO: 2358 - DNA, 20 bp, synthetic construct
  source 1..20: mol_type = other DNA
tatcttcactcatccgtggt

SEQ ID NO: 2359 - DNA, 20 bp, synthetic construct
  source 1..20: mol_type = other DNA
ggcccttggatgttcatgtc

SEQ ID NO: 2360 - DNA, 20 bp, synthetic construct
  source 1..20: mol_type = other DNA
cctcgggcaagcccgccagc

SEQ ID NO: 2361 - DNA, 20 bp, synthetic construct
  source 1..20: mol_type = other DNA
gcacccaacattggcaaagg

SEQ ID NO: 2362 - DNA, 20 bp, synthetic construct
  source 1..20: mol_type = other DNA
ctggcagggttagattggac

SEQ ID NO: 2363 - DNA, 20 bp, synthetic construct
  source 1..20: mol_type = other DNA
atcccaaccggacagggacc

SEQ ID NO: 2364 - DNA, 20 bp, synthetic construct
  source 1..20: mol_type = other DNA
agaatcggcaatccccagta

SEQ ID NO: 2365 - DNA, 20 bp, synthetic construct
  source 1..20: mol_type = other DNA
ggcatactcgcagtccccca

SEQ ID NO: 2366 - DNA, 20 bp, synthetic construct
  source 1..20: mol_type = other DNA
tcggtttatgctatttcaac

SEQ ID NO: 2367 - DNA, 20 bp, synthetic construct
  source 1..20: mol_type = other DNA
tcaaatacaggtcaccaccc

SEQ ID NO: 2368 - DNA, 20 bp, synthetic construct
  source 1..20: mol_type = other DNA
ccttatactcactgagaacg

SEQ ID NO: 2369 - DNA, 20 bp, synthetic construct
  source 1..20: mol_type = other DNA
ggatctgatccacactggtg

SEQ ID NO: 2370 - DNA, 20 bp, synthetic construct
  source 1..20: mol_type = other DNA
cttaagacctaggtatatgc

SEQ ID NO: 2371 - DNA, 20 bp, synthetic construct
  source 1..20: mol_type = other DNA
gctcaagaattaaggaggcc

SEQ ID NO: 2372 - DNA, 20 bp, synthetic construct
  source 1..20: mol_type = other DNA
agaacccacaaggcacggta

SEQ ID NO: 2373 - DNA, 20 bp, synthetic construct
  source 1..20: mol_type = other DNA
gccgttcacctgcgcagaaa

SEQ ID NO: 2374 - DNA, 20 bp, synthetic construct
  source 1..20: mol_type = other DNA
aaccccgtctcatattccag

SEQ ID NO: 2375 - DNA, 20 bp, synthetic construct
  source 1..20: mol_type = other DNA
acaacagccccacggtcact

SEQ ID NO: 2376 - DNA, 20 bp, synthetic construct
  source 1..20: mol_type = other DNA
gacccaatgatgtcatgcca

SEQ ID NO: 2377 - DNA, 20 bp, synthetic construct
  source 1..20: mol_type = other DNA
cgcccagctacccttaggtt

SEQ ID NO: 2378 - DNA, 20 bp, synthetic construct
  source 1..20: mol_type = other DNA
gaaggctcccactgcaaggc

SEQ ID NO: 2379 - DNA, 20 bp, synthetic construct
  source 1..20: mol_type = other DNA
cgcctccagcaactgaagtt

SEQ ID NO: 2380 - DNA, 20 bp, synthetic construct
  source 1..20: mol_type = other DNA
gaggtggagccgtgtgcagc

SEQ ID NO: 2381 - DNA, 20 bp, synthetic construct
  source 1..20: mol_type = other DNA
atagaatgacggtaagttct

SEQ ID NO: 2382 - DNA, 20 bp, synthetic construct
  source 1..20: mol_type = other DNA
atgtagaccacaagtactga

SEQ ID NO: 2383 - DNA, 20 bp, synthetic construct
  source 1..20: mol_type = other DNA
atcccgatggcagaaacatt

SEQ ID NO: 2384 - DNA, 20 bp, synthetic construct
  source 1..20: mol_type = other DNA
aagcgatgcatccgttttgg

SEQ ID NO: 2385 - DNA, 20 bp, synthetic construct
  source 1..20: mol_type = other DNA
tcctcatgagccatgcggac

SEQ ID NO: 2386 - DNA, 20 bp, synthetic construct
  source 1..20: mol_type = other DNA
cccactacactcacccggtg

SEQ ID NO: 2387 - DNA, 20 bp, synthetic construct
  source 1..20: mol_type = other DNA
ccagtgcctcgccccaagac

SEQ ID NO: 2388 - DNA, 20 bp, synthetic construct
  source 1..20: mol_type = other DNA
cactcggctgtatttgtgaa

SEQ ID NO: 2389 - DNA, 20 bp, synthetic construct
  source 1..20: mol_type = other DNA
tgaccgcgactcctaattat

SEQ ID NO: 2390 - DNA, 20 bp, synthetic construct
  source 1..20: mol_type = other DNA
gccagtatcttgtacggact

SEQ ID NO: 2391 - DNA, 20 bp, synthetic construct
  source 1..20: mol_type = other DNA
ggaaagtccatagttgggag

SEQ ID NO: 2392 - DNA, 20 bp, synthetic construct
  source 1..20: mol_type = other DNA
cgcctaccgtcttaatcgca

SEQ ID NO: 2393 - DNA, 20 bp, synthetic construct
  source 1..20: mol_type = other DNA
cgagagcccccccatttcct

SEQ ID NO: 2394 - DNA, 20 bp, synthetic construct
  source 1..20: mol_type = other DNA
caactgttacaagtaggatg

SEQ ID NO: 2395 - DNA, 20 bp, synthetic construct
  source 1..20: mol_type = other DNA
gttctgttactctaggatgg

SEQ ID NO: 2396 - DNA, 20 bp, synthetic construct
  source 1..20: mol_type = other DNA
gcagacatatagtactaggg

SEQ ID NO: 2397 - DNA, 20 bp, synthetic construct
  source 1..20: mol_type = other DNA
cctgggcctgcatacggcga

SEQ ID NO: 2398 - DNA, 20 bp, synthetic construct
  source 1..20: mol_type = other DNA
gctcggcttcctattgcaag

SEQ ID NO: 2399 - DNA, 20 bp, synthetic construct
  source 1..20: mol_type = other DNA
tagggaccccggaggtgtct

SEQ ID NO: 2400 - DNA, 20 bp, synthetic construct
  source 1..20: mol_type = other DNA
gttctccaggtcgaattcat

SEQ ID NO: 2401 - DNA, 20 bp, synthetic construct
  source 1..20: mol_type = other DNA
ccagagggcctccctcgatc

SEQ ID NO: 2402 - DNA, 20 bp, synthetic construct
  source 1..20: mol_type = other DNA
aggcagtcgccgggcacgac

SEQ ID NO: 2403 - DNA, 20 bp, synthetic construct
  source 1..20: mol_type = other DNA
gccctttccatgcagtatcg

SEQ ID NO: 2404 - DNA, 20 bp, synthetic construct
  source 1..20: mol_type = other DNA
gttctggaactcatgcatgg

SEQ ID NO: 2405 - DNA, 20 bp, synthetic construct
  source 1..20: mol_type = other DNA
gatagttgagccgagccaat

SEQ ID NO: 2406 - DNA, 20 bp, synthetic construct
  source 1..20: mol_type = other DNA
tgaaattgttggtccgcgct

SEQ ID NO: 2407 - DNA, 20 bp, synthetic construct
  source 1..20: mol_type = other DNA
agtcatccagcatattgtgg

SEQ ID NO: 2408 - DNA, 20 bp, synthetic construct
  source 1..20: mol_type = other DNA
accctgtcggcactgctatt

SEQ ID NO: 2409 - DNA, 20 bp, synthetic construct
  source 1..20: mol_type = other DNA
tgcgatgtgttcctccatga

SEQ ID NO: 2410 - DNA, 20 bp, synthetic construct
  source 1..20: mol_type = other DNA
gctggatgatacgctgccgc

SEQ ID NO: 2411 - DNA, 20 bp, synthetic construct
  source 1..20: mol_type = other DNA
gctggccgtgggtagcggta

SEQ ID NO: 2412 - DNA, 20 bp, synthetic construct
  source 1..20: mol_type = other DNA
ggatgttgcgccggtccttg

SEQ ID NO: 2413 - DNA, 20 bp, synthetic construct
  source 1..20: mol_type = other DNA
gccgtgtccacagagttgcg

SEQ ID NO: 2414 - DNA, 20 bp, synthetic construct
  source 1..20: mol_type = other DNA
gctgattatgcatattctgg

SEQ ID NO: 2415 - DNA, 20 bp, synthetic construct
  source 1..20: mol_type = other DNA
agaacttggtggcccgcatg

SEQ ID NO: 2416 - DNA, 20 bp, synthetic construct
  source 1..20: mol_type = other DNA
caaactctgaaagtgccccg

SEQ ID NO: 2417 - DNA, 20 bp, synthetic construct
  source 1..20: mol_type = other DNA
ctgcaggcggattccctgga

SEQ ID NO: 2418 - DNA, 20 bp, synthetic construct
  source 1..20: mol_type = other DNA
gatggaagagcctcgaggta

SEQ ID NO: 2419 - DNA, 20 bp, synthetic construct
  source 1..20: mol_type = other DNA
gagttccgggcccccatcca

SEQ ID NO: 2420 - DNA, 20 bp, synthetic construct
  source 1..20: mol_type = other DNA
aggtcacaagggttccccta

SEQ ID NO: 2421 - DNA, 20 bp, synthetic construct
  source 1..20: mol_type = other DNA
cgcagaaatcccatcccccc

SEQ ID NO: 2422 - DNA, 20 bp, synthetic construct
  source 1..20: mol_type = other DNA
atgctgttagggtcataggt

SEQ ID NO: 2423 - DNA, 20 bp, synthetic construct
  source 1..20: mol_type = other DNA
attacagtctccagcccgtc

SEQ ID NO: 2424 - DNA, 20 bp, synthetic construct
  source 1..20: mol_type = other DNA
ccttcccctattccagtacg

SEQ ID NO: 2425 - DNA, 20 bp, synthetic construct
  source 1..20: mol_type = other DNA
cctgactagggacaccagca

SEQ ID NO: 2426 - DNA, 20 bp, synthetic construct
  source 1..20: mol_type = other DNA
tgaggactgactacccggac

SEQ ID NO: 2427 - DNA, 20 bp, synthetic construct
  source 1..20: mol_type = other DNA
cgtgtagatgccacccactg

SEQ ID NO: 2428 - DNA, 20 bp, synthetic construct
  source 1..20: mol_type = other DNA
ccattcgcccatgtctggga

SEQ ID NO: 2429 - DNA, 20 bp, synthetic construct
  source 1..20: mol_type = other DNA
agcaccgctagaaggtagac

SEQ ID NO: 2430 - DNA, 20 bp, synthetic construct
  source 1..20: mol_type = other DNA
ctcttccccgatattccatg

SEQ ID NO: 2431 - DNA, 20 bp, synthetic construct
  source 1..20: mol_type = other DNA
ggttcccttagggacacagt

SEQ ID NO: 2432 - DNA, 20 bp, synthetic construct
  source 1..20: mol_type = other DNA
tgccgtgtttctaagacttg

SEQ ID NO: 2433 - DNA, 20 bp, synthetic construct
  source 1..20: mol_type = other DNA
gtatcacatcccggctaatt

SEQ ID NO: 2434 - DNA, 20 bp, synthetic construct
  source 1..20: mol_type = other DNA
tattttccgtgccccctgct

SEQ ID NO: 2435 - DNA, 20 bp, synthetic construct
  source 1..20: mol_type = other DNA
ctcatatcttcactcatccg

SEQ ID NO: 2436 - DNA, 20 bp, synthetic construct
  source 1..20: mol_type = other DNA
gggcccttggatgttcatgt

SEQ ID NO: 2437 - DNA, 20 bp, synthetic construct
  source 1..20: mol_type = other DNA
tcctcgggcaagcccgccag

SEQ ID NO: 2438 - DNA, 20 bp, synthetic construct
  source 1..20: mol_type = other DNA
cgctgtctgcacccaacatt

SEQ ID NO: 2439 - DNA, 20 bp, synthetic construct
  source 1..20: mol_type = other DNA
tcctggcagggttagattgg

SEQ ID NO: 2440 - DNA, 20 bp, synthetic construct
  source 1..20: mol_type = other DNA
aatcccaaccggacagggac

SEQ ID NO: 2441 - DNA, 20 bp, synthetic construct
  source 1..20: mol_type = other DNA
aagaatcggcaatccccagt

SEQ ID NO: 2442 - DNA, 20 bp, synthetic construct
  source 1..20: mol_type = other DNA
tggcatactcgcagtccccc

SEQ ID NO: 2443 - DNA, 20 bp, synthetic construct
  source 1..20: mol_type = other DNA
ctggcgaatattttagacag

SEQ ID NO: 2444 - DNA, 20 bp, synthetic construct
  source 1..20: mol_type = other DNA
ctcaaatacaggtcaccacc

SEQ ID NO: 2445 - DNA, 20 bp, synthetic construct
  source 1..20: mol_type = other DNA
gtagttctcaccttatactc

SEQ ID NO: 2446 - DNA, 20 bp, synthetic construct
  source 1..20: mol_type = other DNA
aacagggatctgatccacac

SEQ ID NO: 2447 - DNA, 20 bp, synthetic construct
  source 1..20: mol_type = other DNA
tcttaagacctaggtatatg

SEQ ID NO: 2448 - DNA, 20 bp, synthetic construct
  source 1..20: mol_type = other DNA
cgctcaagaattaaggaggc

SEQ ID NO: 2449 - DNA, 20 bp, synthetic construct
  source 1..20: mol_type = other DNA
aagaacccacaaggcacggt

SEQ ID NO: 2450 - DNA, 20 bp, synthetic construct
  source 1..20: mol_type = other DNA
tgccgttcacctgcgcagaa

SEQ ID NO: 2451 - DNA, 20 bp, synthetic construct
  source 1..20: mol_type = other DNA
caaccccgtctcatattcca

SEQ ID NO: 2452 - DNA, 20 bp, synthetic construct
  source 1..20: mol_type = other DNA
acacaacagccccacggtca

SEQ ID NO: 2453 - DNA, 20 bp, synthetic construct
  source 1..20: mol_type = other DNA
ggacccaatgatgtcatgcc

SEQ ID NO: 2454 - DNA, 20 bp, synthetic construct
  source 1..20: mol_type = other DNA
gcgcccagctacccttaggt

SEQ ID NO: 2455 - DNA, 20 bp, synthetic construct
  source 1..20: mol_type = other DNA
gggaaggctcccactgcaag

SEQ ID NO: 2456 - DNA, 20 bp, synthetic construct
  source 1..20: mol_type = other DNA
ctcgcctccagcaactgaag

SEQ ID NO: 2457 - DNA, 20 bp, synthetic construct
  source 1..20: mol_type = other DNA
tagaggtggagccgtgtgca

SEQ ID NO: 2458 - DNA, 20 bp, synthetic construct
  source 1..20: mol_type = other DNA
aatagaatgacggtaagttc

SEQ ID NO: 2459 - DNA, 20 bp, synthetic construct
  source 1..20: mol_type = other DNA
ccaatgtagaccacaagtac

SEQ ID NO: 2460 - DNA, 20 bp, synthetic construct
  source 1..20: mol_type = other DNA
catcccgatggcagaaacat

SEQ ID NO: 2461 - DNA, 20 bp, synthetic construct
  source 1..20: mol_type = other DNA
caagcgatgcatccgttttg

SEQ ID NO: 2462 - DNA, 20 bp, synthetic construct
  source 1..20: mol_type = other DNA
ttcctcatgagccatgcgga

SEQ ID NO: 2463 - DNA, 20 bp, synthetic construct
  source 1..20: mol_type = other DNA
gcccactacactcacccggt

SEQ ID NO: 2464 - DNA, 20 bp, synthetic construct
  source 1..20: mol_type = other DNA
gaacaggtgattaccattgt

SEQ ID NO: 2465 - DNA, 20 bp, synthetic construct
  source 1..20: mol_type = other DNA
acactcggctgtatttgtga

SEQ ID NO: 2466 - DNA, 20 bp, synthetic construct
  source 1..20: mol_type = other DNA
ctgaccgcgactcctaatta

SEQ ID NO: 2467 - DNA, 20 bp, synthetic construct
  source 1..20: mol_type = other DNA
tgtgccagtatcttgtacgg

SEQ ID NO: 2468 - DNA, 20 bp, synthetic construct
  source 1..20: mol_type = other DNA
tgcgggaaagtccatagttg

SEQ ID NO: 2469 - DNA, 20 bp, synthetic construct
  source 1..20: mol_type = other DNA
tcgcctaccgtcttaatcgc

SEQ ID NO: 2470 - DNA, 20 bp, synthetic construct
  source 1..20: mol_type = other DNA
ccgagagcccccccatttcc

SEQ ID NO: 2471 - DNA, 20 bp, synthetic construct
  source 1..20: mol_type = other DNA
gcaactgttacaagtaggat

SEQ ID NO: 2472 - DNA, 20 bp, synthetic construct
  source 1..20: mol_type = other DNA
ttggccacacccttatgcaa

SEQ ID NO: 2473 - DNA, 20 bp, synthetic construct
  source 1..20: mol_type = other DNA
cgcagacatatagtactagg

SEQ ID NO: 2474 - DNA, 20 bp, synthetic construct
  source 1..20: mol_type = other DNA
ccctgggcctgcatacggcg

SEQ ID NO: 2475 - DNA, 20 bp, synthetic construct
  source 1..20: mol_type = other DNA
cgctcggcttcctattgcaa

SEQ ID NO: 2476 - DNA, 20 bp, synthetic construct
  source 1..20: mol_type = other DNA
gtagggaccccggaggtgtc

SEQ ID NO: 2477 - DNA, 20 bp, synthetic construct
  source 1..20: mol_type = other DNA
ccacttcgaagagcactgcg

SEQ ID NO: 2478 - DNA, 20 bp, synthetic construct
  source 1..20: mol_type = other DNA
accagagggcctccctcgat

SEQ ID NO: 2479 - DNA, 20 bp, synthetic construct
  source 1..20: mol_type = other DNA
caggcagtcgccgggcacga

SEQ ID NO: 2480 - DNA, 20 bp, synthetic construct
  source 1..20: mol_type = other DNA
cgccctttccatgcagtatc

SEQ ID NO: 2481 - DNA, 20 bp, synthetic construct
  source 1..20: mol_type = other DNA
gcatggaggttctggaactc

SEQ ID NO: 2482 - DNA, 20 bp, synthetic construct
  source 1..20: mol_type = other DNA
agatagttgagccgagccaa

SEQ ID NO: 2483 - DNA, 20 bp, synthetic construct
  source 1..20: mol_type = other DNA
ttgaaattgttggtccgcgc

SEQ ID NO: 2484 - DNA, 20 bp, synthetic construct
  source 1..20: mol_type = other DNA
aggagtcatccagcatattg

SEQ ID NO: 2485 - DNA, 20 bp, synthetic construct
  source 1..20: mol_type = other DNA
caccctgtcggcactgctat

SEQ ID NO: 2486 - DNA, 20 bp, synthetic construct
  source 1..20: mol_type = other DNA
tctgcgatgtgttcctccat

SEQ ID NO: 2487 - DNA, 20 bp, synthetic construct
  source 1..20: mol_type = other DNA
cgctggatgatacgctgccg

SEQ ID NO: 2488 - DNA, 20 bp, synthetic construct
  source 1..20: mol_type = other DNA
aggctggccgtgggtagcgg

SEQ ID NO: 2489 - DNA, 20 bp, synthetic construct
  source 1..20: mol_type = other DNA
cggatgttgcgccggtcctt

SEQ ID NO: 2490 - DNA, 20 bp, synthetic construct
  source 1..20: mol_type = other DNA
tggccgtgtccacagagttg

SEQ ID NO: 2491 - DNA, 20 bp, synthetic construct
  source 1..20: mol_type = other DNA
gcgctgattatgcatattct

SEQ ID NO: 2492 - DNA, 20 bp, synthetic construct
  source 1..20: mol_type = other DNA
cagaacttggtggcccgcat

SEQ ID NO: 2493 - DNA, 20 bp, synthetic construct
  source 1..20: mol_type = other DNA
gaccatctgctctcagttac

SEQ ID NO: 2494 - DNA, 20 bp, synthetic construct
  source 1..20: mol_type = other DNA
gtcctctgcaggcggattcc

SEQ ID NO: 2495 - DNA, 20 bp, synthetic construct
  source 1..20: mol_type = other DNA
caagcggtgcagacacagca

SEQ ID NO: 2496 - DNA, 20 bp, synthetic construct
  source 1..20: mol_type = other DNA
agagttccgggcccccatcc

SEQ ID NO: 2497 - DNA, 20 bp, synthetic construct
  source 1..20: mol_type = other DNA
aacgaaccatccctctccca

SEQ ID NO: 2498 - DNA, 20 bp, synthetic construct
  source 1..20: mol_type = other DNA
gtttgcacgcagaaatccca

SEQ ID NO: 2499 - DNA, 20 bp, synthetic construct
  source 1..20: mol_type = other DNA
catgctgttagggtcatagg

SEQ ID NO: 2500 - DNA, 20 bp, synthetic construct
  source 1..20: mol_type = other DNA
cattacagtctccagcccgt

SEQ ID NO: 2501 - DNA, 20 bp, synthetic construct
  source 1..20: mol_type = other DNA
gactaacttaggacttccca

SEQ ID NO: 2502 - DNA, 20 bp, synthetic construct
  source 1..20: mol_type = other DNA
ccctgactagggacaccagc

SEQ ID NO: 2503 - DNA, 20 bp, synthetic construct
  source 1..20: mol_type = other DNA
ctgaggactgactacccgga

SEQ ID NO: 2504 - DNA, 20 bp, synthetic construct
  source 1..20: mol_type = other DNA
ccgtgtagatgccacccact

SEQ ID NO: 2505 - DNA, 20 bp, synthetic construct
  source 1..20: mol_type = other DNA
tccattcgcccatgtctggg

SEQ ID NO: 2506 - DNA, 20 bp, synthetic construct
  source 1..20: mol_type = other DNA
cagcaccgctagaaggtaga

SEQ ID NO: 2507 - DNA, 20 bp, synthetic construct
  source 1..20: mol_type = other DNA
taatccctgatctgcccatc

SEQ ID NO: 2508 - DNA, 20 bp, synthetic construct
  source 1..20: mol_type = other DNA
ctgttctgggttcccttagg

SEQ ID NO: 2509 - DNA, 20 bp, synthetic construct
  source 1..20: mol_type = other DNA
cactgccgtgtttctaagac

SEQ ID NO: 2510 - DNA, 20 bp, synthetic construct
  source 1..20: mol_type = other DNA
ggtatcacatcccggctaat

SEQ ID NO: 2511 - DNA, 20 bp, synthetic construct
  source 1..20: mol_type = other DNA
atattttccgtgccccctgc

SEQ ID NO: 2512 - DNA, 20 bp, synthetic construct
  source 1..20: mol_type = other DNA
cccgaaatacacctgggatg

SEQ ID NO: 2513 - DNA, 20 bp, synthetic construct
  source 1..20: mol_type = other DNA
tgggcccttggatgttcatg

SEQ ID NO: 2514 - DNA, 20 bp, synthetic construct
  source 1..20: mol_type = other DNA
ttcctcgggcaagcccgcca

SEQ ID NO: 2515 - DNA, 20 bp, synthetic construct
  source 1..20: mol_type = other DNA
tacgctgtctgcacccaaca

SEQ ID NO: 2516 - DNA, 20 bp, synthetic construct
  source 1..20: mol_type = other DNA
gtcctggcagggttagattg

SEQ ID NO: 2517 - DNA, 20 bp, synthetic construct
  source 1..20: mol_type = other DNA
caatcccaaccggacaggga

SEQ ID NO: 2518 - DNA, 20 bp, synthetic construct
  source 1..20: mol_type = other DNA
aaagaatcggcaatccccag

SEQ ID NO: 2519 - DNA, 20 bp, synthetic construct
  source 1..20: mol_type = other DNA
ctggcatactcgcagtcccc

SEQ ID NO: 2520 - DNA, 20 bp, synthetic construct
  source 1..20: mol_type = other DNA
gtctggcgaatattttagac

SEQ ID NO: 2521 - DNA, 20 bp, synthetic construct
  source 1..20: mol_type = other DNA
cctcaaatacaggtcaccac

SEQ ID NO: 2522 - DNA, 20 bp, synthetic construct
  source 1..20: mol_type = other DNA
gttgtagttctcaccttata

SEQ ID NO: 2523 - DNA, 20 bp, synthetic construct
  source 1..20: mol_type = other DNA
taacagggatctgatccaca

SEQ ID NO: 2524 - DNA, 20 bp, synthetic construct
  source 1..20: mol_type = other DNA
cctctcttaagacctaggta

SEQ ID NO: 2525 - DNA, 20 bp, synthetic construct
  source 1..20: mol_type = other DNA
gcgctcaagaattaaggagg

SEQ ID NO: 2526 - DNA, 20 bp, synthetic construct
  source 1..20: mol_type = other DNA
taaagaacccacaaggcacg

SEQ ID NO: 2527 - DNA, 20 bp, synthetic construct
  source 1..20: mol_type = other DNA
ctgccgttcacctgcgcaga

SEQ ID NO: 2528 - DNA, 20 bp, synthetic construct
  source 1..20: mol_type = other DNA
acaaccccgtctcatattcc

SEQ ID NO: 2529 - DNA, 20 bp, synthetic construct
  source 1..20: mol_type = other DNA
cacacaacagccccacggtc

SEQ ID NO: 2530 - DNA, 20 bp, synthetic construct
  source 1..20: mol_type = other DNA
gatgaggacccaatgatgtc

SEQ ID NO: 2531 - DNA, 20 bp, synthetic construct
  source 1..20: mol_type = other DNA
cgcgcccagctacccttagg

SEQ ID NO: 2532 - DNA, 20 bp, synthetic construct
  source 1..20: mol_type = other DNA
cgggaaggctcccactgcaa

SEQ ID NO: 2533 - DNA, 20 bp, synthetic construct
  source 1..20: mol_type = other DNA
gcctcgcctccagcaactga

SEQ ID NO: 2534 - DNA, 20 bp, synthetic construct
  source 1..20: mol_type = other DNA
ggtagaggtggagccgtgtg

SEQ ID NO: 2535 - DNA, 20 bp, synthetic construct
  source 1..20: mol_type = other DNA
tcaatagaatgacggtaagt

SEQ ID NO: 2536 - DNA, 20 bp, synthetic construct
  source 1..20: mol_type = other DNA
cccaatgtagaccacaagta

SEQ ID NO: 2537 - DNA, 20 bp, synthetic construct
  source 1..20: mol_type = other DNA
agcatcccgatggcagaaac

SEQ ID NO: 2538 - DNA, 20 bp, synthetic construct
  source 1..20: mol_type = other DNA
tcaagcgatgcatccgtttt

SEQ ID NO: 2539 - DNA, 20 bp, synthetic construct
  source 1..20: mol_type = other DNA
cttcctcatgagccatgcgg

SEQ ID NO: 2540 - DNA, 20 bp, synthetic construct
  source 1..20: mol_type = other DNA
tgcccactacactcacccgg

SEQ ID NO: 2541 - DNA, 20 bp, synthetic construct
  source 1..20: mol_type = other DNA
agaacaggtgattaccattg

SEQ ID NO: 2542 - DNA, 20 bp, synthetic construct
  source 1..20: mol_type = other DNA
cacactcggctgtatttgtg

SEQ ID NO: 2543 - DNA, 20 bp, synthetic construct
  source 1..20: mol_type = other DNA
gctgaccgcgactcctaatt

SEQ ID NO: 2544 - DNA, 20 bp, synthetic construct
  source 1..20: mol_type = other DNA
ttgtgccagtatcttgtacg

SEQ ID NO: 2545 - DNA, 20 bp, synthetic construct
  source 1..20: mol_type = other DNA
atgcgggaaagtccatagtt

SEQ ID NO: 2546 - DNA, 20 bp, synthetic construct
  source 1..20: mol_type = other DNA
atcgcctaccgtcttaatcg

SEQ ID NO: 2547 - DNA, 20 bp, synthetic construct
  source 1..20: mol_type = other DNA
cccgagagcccccccatttc

SEQ ID NO: 2548 - DNA, 20 bp, synthetic construct
  source 1..20: mol_type = other DNA
ggttcattgcttaaagggac

SEQ ID NO: 2549 - DNA, 20 bp, synthetic construct
  source 1..20: mol_type = other DNA
tttggccacacccttatgca

SEQ ID NO: 2550 - DNA, 20 bp, synthetic construct
  source 1..20: mol_type = other DNA
gcgcagacatatagtactag

SEQ ID NO: 2551 - DNA, 20 bp, synthetic construct
  source 1..20: mol_type = other DNA
tacccctgggcctgcatacg

SEQ ID NO: 2552 - DNA, 20 bp, synthetic construct
  source 1..20: mol_type = other DNA
gacgggaagcttgcaagacg

SEQ ID NO: 2553 - DNA, 20 bp, synthetic construct
  source 1..20: mol_type = other DNA
aggtagggaccccggaggtg

SEQ ID NO: 2554 - DNA, 20 bp, synthetic construct
  source 1..20: mol_type = other DNA
ggccacttcgaagagcactg

SEQ ID NO: 2555 - DNA, 20 bp, synthetic construct
  source 1..20: mol_type = other DNA
ccaccagagggcctccctcg

SEQ ID NO: 2556 - DNA, 20 bp, synthetic construct
  source 1..20: mol_type = other DNA
acaggcagtcgccgggcacg

SEQ ID NO: 2557 - DNA, 20 bp, synthetic construct
  source 1..20: mol_type = other DNA
gccgccctttccatgcagta

SEQ ID NO: 2558 - DNA, 20 bp, synthetic construct
  source 1..20: mol_type = other DNA
cttgctctgagcatggaggt

SEQ ID NO: 2559 - DNA, 20 bp, synthetic construct
  source 1..20: mol_type = other DNA
cagatagttgagccgagcca

SEQ ID NO: 2560 - DNA, 20 bp, synthetic construct
  source 1..20: mol_type = other DNA
gttgaaattgttggtccgcg

SEQ ID NO: 2561 - DNA, 20 bp, synthetic construct
  source 1..20: mol_type = other DNA
gaggagtcatccagcatatt

SEQ ID NO: 2562 - DNA, 20 bp, synthetic construct
  source 1..20: mol_type = other DNA
ccttcaccctgtcggcactg

SEQ ID NO: 2563 - DNA, 20 bp, synthetic construct
  source 1..20: mol_type = other DNA
gggtctgcgatgtgttcctc

SEQ ID NO: 2564 - DNA, 20 bp, synthetic construct
  source 1..20: mol_type = other DNA
tccgctggatgatacgctgc

SEQ ID NO: 2565 - DNA, 20 bp, synthetic construct
  source 1..20: mol_type = other DNA
gaggctggccgtgggtagcg

SEQ ID NO: 2566 - DNA, 20 bp, synthetic construct
  source 1..20: mol_type = other DNA
acggatgttgcgccggtcct

SEQ ID NO: 2567 - DNA, 20 bp, synthetic construct
  source 1..20: mol_type = other DNA
gtggccgtgtccacagagtt

SEQ ID NO: 2568 - DNA, 20 bp, synthetic construct
  source 1..20: mol_type = other DNA
tggcctctgggaagcggtcc

SEQ ID NO: 2569 - DNA, 20 bp, synthetic construct
  source 1..20: mol_type = other DNA
tccagaacttggtggcccgc

SEQ ID NO: 2570 - DNA, 20 bp, synthetic construct
  source 1..20: mol_type = other DNA
ggaccatctgctctcagtta

SEQ ID NO: 2571 - DNA, 20 bp, synthetic construct
  source 1..20: mol_type = other DNA
tgtcctctgcaggcggattc

SEQ ID NO: 2572 - DNA, 20 bp, synthetic construct
  source 1..20: mol_type = other DNA
ccaagcggtgcagacacagc

SEQ ID NO: 2573 - DNA, 20 bp, synthetic construct
  source 1..20: mol_type = other DNA
tcagagttccgggcccccat

SEQ ID NO: 2574 - DNA, 20 bp, synthetic construct
  source 1..20: mol_type = other DNA
caaacgaaccatccctctcc

SEQ ID NO: 2575 - DNA, 20 bp, synthetic construct
  source 1..20: mol_type = other DNA
ggtttgcacgcagaaatccc

SEQ ID NO: 2576 - DNA, 20 bp, synthetic construct
  source 1..20: mol_type = other DNA
accatgctgttagggtcata

SEQ ID NO: 2577 - DNA, 20 bp, synthetic construct
  source 1..20: mol_type = other DNA
tcattacagtctccagcccg

SEQ ID NO: 2578 - DNA, 20 bp, synthetic construct
  source 1..20: mol_type = other DNA
ctgactaacttaggacttcc

SEQ ID NO: 2579 - DNA, 20 bp, synthetic construct
  source 1..20: mol_type = other DNA
tccctgactagggacaccag

SEQ ID NO: 2580 - DNA, 20 bp, synthetic construct
  source 1..20: mol_type = other DNA
agctgaggactgactacccg

SEQ ID NO: 2581 - DNA, 20 bp, synthetic construct
  source 1..20: mol_type = other DNA
ggcaggctgtccacccgctt

SEQ ID NO: 2582 - DNA, 20 bp, synthetic construct
  source 1..20: mol_type = other DNA
gtccattcgcccatgtctgg

SEQ ID NO: 2583 - DNA, 20 bp, synthetic construct
  source 1..20: mol_type = other DNA
ccagcaccgctagaaggtag

SEQ ID NO: 2584 - DNA, 20 bp, synthetic construct
  source 1..20: mol_type = other DNA
ctttccgtcttcaccctggg

SEQ ID NO: 2585 - DNA, 20 bp, synthetic construct
  source 1..20: mol_type = other DNA
gctgttctgggttcccttag

SEQ ID NO: 2586 - DNA, 20 bp, synthetic construct
  source 1..20: mol_type = other DNA
ccactgccgtgtttctaaga

SEQ ID NO: 2587 - DNA, 20 bp, synthetic construct
  source 1..20: mol_type = other DNA
aggtatcacatcccggctaa

SEQ ID NO: 2588 - DNA, 20 bp, synthetic construct
  source 1..20: mol_type = other DNA
aatattttccgtgccccctg

SEQ ID NO: 2589 - DNA, 20 bp, synthetic construct
  source 1..20: mol_type = other DNA
gcccgaaatacacctgggat

SEQ ID NO: 2590 - DNA, 20 bp, synthetic construct
  source 1..20: mol_type = other DNA
tagagcctgggcccttggat

SEQ ID NO: 2591 - DNA, 20 bp, synthetic construct
  source 1..20: mol_type = other DNA
attcctcgggcaagcccgcc

SEQ ID NO: 2592 - DNA, 20 bp, synthetic construct
  source 1..20: mol_type = other DNA
gtacgctgtctgcacccaac

SEQ ID NO: 2593 - DNA, 20 bp, synthetic construct
  source 1..20: mol_type = other DNA
agtcctggcagggttagatt

SEQ ID NO: 2594 - DNA, 20 bp, synthetic construct
  source 1..20: mol_type = other DNA
gcaatcccaaccggacaggg

SEQ ID NO: 2595 - DNA, 20 bp, synthetic construct
  source 1..20: mol_type = other DNA
aaaagaatcggcaatcccca

SEQ ID NO: 2596 - DNA, 20 bp, synthetic construct
  source 1..20: mol_type = other DNA
cctggcatactcgcagtccc

SEQ ID NO: 2597 - DNA, 20 bp, synthetic construct
  source 1..20: mol_type = other DNA
caaatcatgcaatggcacga

SEQ ID NO: 2598 - DNA, 20 bp, synthetic construct
  source 1..20: mol_type = other DNA
agcctcaaatacaggtcacc

SEQ ID NO: 2599 - DNA, 20 bp, synthetic construct
  source 1..20: mol_type = other DNA
gagttgtagttctcacctta

SEQ ID NO: 2600 - DNA, 20 bp, synthetic construct
  source 1..20: mol_type = other DNA
ctaacagggatctgatccac

SEQ ID NO: 2601 - DNA, 20 bp, synthetic construct
  source 1..20: mol_type = other DNA
acgccctcctctcttaagac

SEQ ID NO: 2602 - DNA, 20 bp, synthetic construct
  source 1..20: mol_type = other DNA
tgagcccattgttccagcgc

SEQ ID NO: 2603 - DNA, 20 bp, synthetic construct
  source 1..20: mol_type = other DNA
gcctaaagaacccacaaggc

SEQ ID NO: 2604 - DNA, 20 bp, synthetic construct
  source 1..20: mol_type = other DNA
gctgccgttcacctgcgcag

SEQ ID NO: 2605 - DNA, 20 bp, synthetic construct
  source 1..20: mol_type = other DNA
gacaaccccgtctcatattc

SEQ ID NO: 2606 - DNA, 20 bp, synthetic construct
  source 1..20: mol_type = other DNA
tcacacaacagccccacggt

SEQ ID NO: 2607 - DNA, 20 bp, synthetic construct
  source 1..20: mol_type = other DNA
cgatgaggacccaatgatgt

SEQ ID NO: 2608 - DNA, 20 bp, synthetic construct
  source 1..20: mol_type = other DNA
gccgcgcccagctaccctta

SEQ ID NO: 2609 - DNA, 20 bp, synthetic construct
  source 1..20: mol_type = other DNA
tcgggaaggctcccactgca

SEQ ID NO: 2610 - DNA, 20 bp, synthetic construct
  source 1..20: mol_type = other DNA
gtgcctcgcctccagcaact

SEQ ID NO: 2611 - DNA, 20 bp, synthetic construct
  source 1..20: mol_type = other DNA
gggtagaggtggagccgtgt

SEQ ID NO: 2612 - DNA, 20 bp, synthetic construct
  source 1..20: mol_type = other DNA
ctcaatagaatgacggtaag

SEQ ID NO: 2613 - DNA, 20 bp, synthetic construct
  source 1..20: mol_type = other DNA
ccccaatgtagaccacaagt

SEQ ID NO: 2614 - DNA, 20 bp, synthetic construct
  source 1..20: mol_type = other DNA
cagcatcccgatggcagaaa

SEQ ID NO: 2615 - DNA, 20 bp, synthetic construct
  source 1..20: mol_type = other DNA
tagtacaacctgtaaaggtt

SEQ ID NO: 2616 - DNA, 20 bp, synthetic construct
  source 1..20: mol_type = other DNA
acttcctcatgagccatgcg

SEQ ID NO: 2617 - DNA, 20 bp, synthetic construct
  source 1..20: mol_type = other DNA
atgaccacgctgtcccctgc

SEQ ID NO: 2618 - DNA, 20 bp, synthetic construct
  source 1..20: mol_type = other DNA
gcagaacaggtgattaccat

SEQ ID NO: 2619 - DNA, 20 bp, synthetic construct
  source 1..20: mol_type = other DNA
gccacactcggctgtatttg

SEQ ID NO: 2620 - DNA, 20 bp, synthetic construct
  source 1..20: mol_type = other DNA
gggctgaccgcgactcctaa

SEQ ID NO: 2621 - DNA, 20 bp, synthetic construct
  source 1..20: mol_type = other DNA
gatcctttcttgtgccagta

SEQ ID NO: 2622 - DNA, 20 bp, synthetic construct
  source 1..20: mol_type = other DNA
gatgcgggaaagtccatagt

SEQ ID NO: 2623 - DNA, 20 bp, synthetic construct
  source 1..20: mol_type = other DNA
catcgcctaccgtcttaatc

SEQ ID NO: 2624 - DNA, 20 bp, synthetic construct
  source 1..20: mol_type = other DNA
gcccgagagcccccccattt

SEQ ID NO: 2625 - DNA, 20 bp, synthetic construct
  source 1..20: mol_type = other DNA
tggttcattgcttaaaggga

SEQ ID NO: 2626 - DNA, 20 bp, synthetic construct
  source 1..20: mol_type = other DNA
cgaattctcaagtgagtctc

SEQ ID NO: 2627 - DNA, 20 bp, synthetic construct
  source 1..20: mol_type = other DNA
cgcgcagacatatagtacta

SEQ ID NO: 2628 - DNA, 20 bp, synthetic construct
  source 1..20: mol_type = other DNA
ggtacccctgggcctgcata

SEQ ID NO: 2629 - DNA, 20 bp, synthetic construct
  source 1..20: mol_type = other DNA
cgacgggaagcttgcaagac

SEQ ID NO: 2630 - DNA, 20 bp, synthetic construct
  source 1..20: mol_type = other DNA
caggtagggaccccggaggt

SEQ ID NO: 2631 - DNA, 20 bp, synthetic construct
  source 1..20: mol_type = other DNA
accgtgtagatgccacccac

SEQ ID NO: 2632 - DNA, 20 bp, synthetic construct
  source 1..20: mol_type = other DNA
gagcaccaccagagggcctc

SEQ ID NO: 2633 - DNA, 20 bp, synthetic construct
  source 1..20: mol_type = other DNA
tacaggcagtcgccgggcac

SEQ ID NO: 2634 - DNA, 20 bp, synthetic construct
  source 1..20: mol_type = other DNA
tgccgccctttccatgcagt

SEQ ID NO: 2635 - DNA, 20 bp, synthetic construct
  source 1..20: mol_type = other DNA
tcgagccttgctctgagcat

SEQ ID NO: 2636 - DNA, 20 bp, synthetic construct
  source 1..20: mol_type = other DNA
agcagatagttgagccgagc

SEQ ID NO: 2637 - DNA, 20 bp, synthetic construct
  source 1..20: mol_type = other DNA
cgttgaaattgttggtccgc

SEQ ID NO: 2638 - DNA, 20 bp, synthetic construct
  source 1..20: mol_type = other DNA
tgaggagtcatccagcatat

SEQ ID NO: 2639 - DNA, 20 bp, synthetic construct
  source 1..20: mol_type = other DNA
accttcaccctgtcggcact

SEQ ID NO: 2640 - DNA, 20 bp, synthetic construct
  source 1..20: mol_type = other DNA
cggtcaagaatgtagatacc

SEQ ID NO: 2641 - DNA, 20 bp, synthetic construct
  source 1..20: mol_type = other DNA
ttccgctggatgatacgctg

SEQ ID NO: 2642 - DNA, 20 bp, synthetic construct
  source 1..20: mol_type = other DNA
cgaggctggccgtgggtagc

SEQ ID NO: 2643 - DNA, 20 bp, synthetic construct
  source 1..20: mol_type = other DNA
gcacggatgttgcgccggtc

SEQ ID NO: 2644 - DNA, 20 bp, synthetic construct
  source 1..20: mol_type = other DNA
cgctcctcgcccagggagct

SEQ ID NO: 2645 - DNA, 20 bp, synthetic construct
  source 1..20: mol_type = other DNA
gtaatggcagattcctggcc

SEQ ID NO: 2646 - DNA, 20 bp, synthetic construct
  source 1..20: mol_type = other DNA
ttccagaacttggtggcccg

SEQ ID NO: 2647 - DNA, 20 bp, synthetic construct
  source 1..20: mol_type = other DNA
atggaggaccatctgctctc

SEQ ID NO: 2648 - DNA, 20 bp, synthetic construct
  source 1..20: mol_type = other DNA
ctgtcctctgcaggcggatt

SEQ ID NO: 2649 - DNA, 20 bp, synthetic construct
  source 1..20: mol_type = other DNA
accaagcggtgcagacacag

SEQ ID NO: 2650 - DNA, 20 bp, synthetic construct
  source 1..20: mol_type = other DNA
actcagagttccgggccccc

SEQ ID NO: 2651 - DNA, 20 bp, synthetic construct
  source 1..20: mol_type = other DNA
tcaaacgaaccatccctctc

SEQ ID NO: 2652 - DNA, 20 bp, synthetic construct
  source 1..20: mol_type = other DNA
aggtttgcacgcagaaatcc

SEQ ID NO: 2653 - DNA, 20 bp, synthetic construct
  source 1..20: mol_type = other DNA
gaccatgctgttagggtcat

SEQ ID NO: 2654 - DNA, 20 bp, synthetic construct
  source 1..20: mol_type = other DNA
cccaggcattcattacagtc

SEQ ID NO: 2655 - DNA, 20 bp, synthetic construct
  source 1..20: mol_type = other DNA
tctgactaacttaggacttc

SEQ ID NO: 2656 - DNA, 20 bp, synthetic construct
  source 1..20: mol_type = other DNA
ctctccctgactagggacac

SEQ ID NO: 2657 - DNA, 20 bp, synthetic construct
  source 1..20: mol_type = other DNA
gagctgaggactgactaccc

SEQ ID NO: 2658 - DNA, 20 bp, synthetic construct
  source 1..20: mol_type = other DNA
tggcaggctgtccacccgct

SEQ ID NO: 2659 - DNA, 20 bp, synthetic construct
  source 1..20: mol_type = other DNA
tgtccattcgcccatgtctg

SEQ ID NO: 2660 - DNA, 20 bp, synthetic construct
  source 1..20: mol_type = other DNA
cccagcaccgctagaaggta

SEQ ID NO: 2661 - DNA, 20 bp, synthetic construct
  source 1..20: mol_type = other DNA
ggctgttctgggttccctta

SEQ ID NO: 2662 - DNA, 20 bp, synthetic construct
  source 1..20: mol_type = other DNA
gccactgccgtgtttctaag

SEQ ID NO: 2663 - DNA, 20 bp, synthetic construct
  source 1..20: mol_type = other DNA
aaggtatcacatcccggcta

SEQ ID NO: 2664 - DNA, 20 bp, synthetic construct
  source 1..20: mol_type = other DNA
caatattttccgtgccccct

SEQ ID NO: 2665 - DNA, 20 bp, synthetic construct
  source 1..20: mol_type = other DNA
tgggtggaatgtgtcagacg

SEQ ID NO: 2666 - DNA, 20 bp, synthetic construct
  source 1..20: mol_type = other DNA
cgagagtagagcctgggccc

SEQ ID NO: 2667 - DNA, 20 bp, synthetic construct
  source 1..20: mol_type = other DNA
gaattcctcgggcaagcccg

SEQ ID NO: 2668 - DNA, 20 bp, synthetic construct
  source 1..20: mol_type = other DNA
agggtacgctgtctgcaccc

SEQ ID NO: 2669 - DNA, 20 bp, synthetic construct
  source 1..20: mol_type = other DNA
aagtcctggcagggttagat

SEQ ID NO: 2670 - DNA, 20 bp, synthetic construct
  source 1..20: mol_type = other DNA
agcaatcccaaccggacagg

SEQ ID NO: 2671 - DNA, 20 bp, synthetic construct
  source 1..20: mol_type = other DNA
gaaaagaatcggcaatcccc

SEQ ID NO: 2672 - DNA, 20 bp, synthetic construct
  source 1..20: mol_type = other DNA
tcctggcatactcgcagtcc

SEQ ID NO: 2673 - DNA, 20 bp, synthetic construct
  source 1..20: mol_type = other DNA
ccaaatcatgcaatggcacg

SEQ ID NO: 2674 - DNA, 20 bp, synthetic construct
  source 1..20: mol_type = other DNA
gagagcctcaaatacaggtc

SEQ ID NO: 2675 - DNA, 20 bp, synthetic construct
  source 1..20: mol_type = other DNA
ctaaccagtcaaaggccttc

SEQ ID NO: 2676 - DNA, 20 bp, synthetic construct
  source 1..20: mol_type = other DNA
gctaacagggatctgatcca

SEQ ID NO: 2677 - DNA, 20 bp, synthetic construct
  source 1..20: mol_type = other DNA
gatggttaggctcccaacgc

SEQ ID NO: 2678 - DNA, 20 bp, synthetic construct
  source 1..20: mol_type = other DNA
gtaatacagaggcatcacgg

SEQ ID NO: 2679 - DNA, 20 bp, synthetic construct
  source 1..20: mol_type = other DNA
ctcactctgagcagatagtt

SEQ ID NO: 2680 - DNA, 20 bp, synthetic construct
  source 1..20: mol_type = other DNA
cgctgccgttcacctgcgca

SEQ ID NO: 2681 - DNA, 20 bp, synthetic construct
  source 1..20: mol_type = other DNA
tgacaaccccgtctcatatt

SEQ ID NO: 2682 - DNA, 20 bp, synthetic construct
  source 1..20: mol_type = other DNA
gtcacacaacagccccacgg

SEQ ID NO: 2683 - DNA, 20 bp, synthetic construct
  source 1..20: mol_type = other DNA
gcgatgaggacccaatgatg

SEQ ID NO: 2684 - DNA, 20 bp, synthetic construct
  source 1..20: mol_type = other DNA
gctggtaattggccacctcg

SEQ ID NO: 2685 - DNA, 20 bp, synthetic construct
  source 1..20: mol_type = other DNA
tgtcgggaaggctcccactg

SEQ ID NO: 2686 - DNA, 20 bp, synthetic construct
  source 1..20: mol_type = other DNA
agtgcctcgcctccagcaac

SEQ ID NO: 2687 - DNA, 20 bp, synthetic construct
  source 1..20: mol_type = other DNA
cgataaaactaccactccca

SEQ ID NO: 2688 - DNA, 20 bp, synthetic construct
  source 1..20: mol_type = other DNA
gactcaatagaatgacggta

SEQ ID NO: 2689 - DNA, 20 bp, synthetic construct
  source 1..20: mol_type = other DNA
tccccaatgtagaccacaag

SEQ ID NO: 2690 - DNA, 20 bp, synthetic construct
  source 1..20: mol_type = other DNA
ccagcatcccgatggcagaa

SEQ ID NO: 2691 - DNA, 20 bp, synthetic construct
  source 1..20: mol_type = other DNA
ccactagtacaacctgtaaa

SEQ ID NO: 2692 - DNA, 20 bp, synthetic construct
  source 1..20: mol_type = other DNA
aagactgccgctgcaggagc

SEQ ID NO: 2693 - DNA, 20 bp, synthetic construct
  source 1..20: mol_type = other DNA
catgaccacgctgtcccctg

SEQ ID NO: 2694 - DNA, 20 bp, synthetic construct
  source 1..20: mol_type = other DNA
tagcagaacaggtgattacc

SEQ ID NO: 2695 - DNA, 20 bp, synthetic construct
  source 1..20: mol_type = other DNA
ggccacactcggctgtattt

SEQ ID NO: 2696 - DNA, 20 bp, synthetic construct
  source 1..20: mol_type = other DNA
actagtactatctatcaatc

SEQ ID NO: 2697 - DNA, 20 bp, synthetic construct
  source 1..20: mol_type = other DNA
gtcacaacctgtaagatcct

SEQ ID NO: 2698 - DNA, 20 bp, synthetic construct
  source 1..20: mol_type = other DNA
agatgcgggaaagtccatag

SEQ ID NO: 2699 - DNA, 20 bp, synthetic construct
  source 1..20: mol_type = other DNA
tcatcgcctaccgtcttaat

SEQ ID NO: 2700 - DNA, 20 bp, synthetic construct
  source 1..20: mol_type = other DNA
ggcccgagagcccccccatt

SEQ ID NO: 2701 - DNA, 20 bp, synthetic construct
  source 1..20: mol_type = other DNA
ctggttcattgcttaaaggg

SEQ ID NO: 2702 - DNA, 20 bp, synthetic construct
  source 1..20: mol_type = other DNA
ccgaattctcaagtgagtct

SEQ ID NO: 2703 - DNA, 20 bp, synthetic construct
  source 1..20: mol_type = other DNA
cactcaccgcatccgcctcg

SEQ ID NO: 2704 - DNA, 20 bp, synthetic construct
  source 1..20: mol_type = other DNA
cggtacccctgggcctgcat

SEQ ID NO: 2705 - DNA, 20 bp, synthetic construct
  source 1..20: mol_type = other DNA
ccgacgggaagcttgcaaga

SEQ ID NO: 2706 - DNA, 20 bp, synthetic construct
  source 1..20: mol_type = other DNA
ccaggtagggaccccggagg

SEQ ID NO: 2707 - DNA, 20 bp, synthetic construct
  source 1..20: mol_type = other DNA
caccgtgtagatgccaccca

SEQ ID NO: 2708 - DNA, 20 bp, synthetic construct
  source 1..20: mol_type = other DNA
gcaggtatcccagagctctc

SEQ ID NO: 2709 - DNA, 20 bp, synthetic construct
  source 1..20: mol_type = other DNA
ctacaggcagtcgccgggca

SEQ ID NO: 2710 - DNA, 20 bp, synthetic construct
  source 1..20: mol_type = other DNA
ctgccgccctttccatgcag

SEQ ID NO: 2711 - DNA, 20 bp, synthetic construct
  source 1..20: mol_type = other DNA
ttcgagccttgctctgagca

SEQ ID NO: 2712 - DNA, 20 bp, synthetic construct
  source 1..20: mol_type = other DNA
gagcagatagttgagccgag

SEQ ID NO: 2713 - DNA, 20 bp, synthetic construct
  source 1..20: mol_type = other DNA
tcaccgtgttggccgtgtcc

SEQ ID NO: 2714 - DNA, 20 bp, synthetic construct
  source 1..20: mol_type = other DNA
cggcggatggtggtcaggat

SEQ ID NO: 2715 - DNA, 20 bp, synthetic construct
  source 1..20: mol_type = other DNA
tcaccttcaccctgtcggca

SEQ ID NO: 2716 - DNA, 20 bp, synthetic construct
  source 1..20: mol_type = other DNA
gccggtcaagaatgtagata

SEQ ID NO: 2717 - DNA, 20 bp, synthetic construct
  source 1..20: mol_type = other DNA
gttccgctggatgatacgct

SEQ ID NO: 2718 - DNA, 20 bp, synthetic construct
  source 1..20: mol_type = other DNA
accgaggctggccgtgggta

SEQ ID NO: 2719 - DNA, 20 bp, synthetic construct
  source 1..20: mol_type = other DNA
tgcacggatgttgcgccggt

SEQ ID NO: 2720 - DNA, 20 bp, synthetic construct
  source 1..20: mol_type = other DNA
tacgctcctcgcccagggag

SEQ ID NO: 2721 - DNA, 20 bp, synthetic construct
  source 1..20: mol_type = other DNA
cgcagagtaatggcagattc

SEQ ID NO: 2722 - DNA, 20 bp, synthetic construct
  source 1..20: mol_type = other DNA
aaatggaggaccatctgctc

SEQ ID NO: 2723 - DNA, 20 bp, synthetic construct
  source 1..20: mol_type = other DNA
tgggaataagccaggttagg

SEQ ID NO: 2724 - DNA, 20 bp, synthetic construct
  source 1..20: mol_type = other DNA
aaaccaagcggtgcagacac

SEQ ID NO: 2725 - DNA, 20 bp, synthetic construct
  source 1..20: mol_type = other DNA
aactcagagttccgggcccc

SEQ ID NO: 2726 - DNA, 20 bp, synthetic construct
  source 1..20: mol_type = other DNA
agtcaaacgaaccatccctc

SEQ ID NO: 2727 - DNA, 20 bp, synthetic construct
  source 1..20: mol_type = other DNA
caggtttgcacgcagaaatc

SEQ ID NO: 2728 - DNA, 20 bp, synthetic construct
  source 1..20: mol_type = other DNA
agaccatgctgttagggtca

SEQ ID NO: 2729 - DNA, 20 bp, synthetic construct
  source 1..20: mol_type = other DNA
gcccaggcattcattacagt

SEQ ID NO: 2730 - DNA, 20 bp, synthetic construct
  source 1..20: mol_type = other DNA
ctctgactaacttaggactt

SEQ ID NO: 2731 - DNA, 20 bp, synthetic construct
  source 1..20: mol_type = other DNA
tggccaatccagcttctcac

SEQ ID NO: 2732 - DNA, 20 bp, synthetic construct
  source 1..20: mol_type = other DNA
ctgaaggaattaggcactgg

SEQ ID NO: 2733 - DNA, 20 bp, synthetic construct
  source 1..20: mol_type = other DNA
atggcaggctgtccacccgc

SEQ ID NO: 2734 - DNA, 20 bp, synthetic construct
  source 1..20: mol_type = other DNA
tctgtccattcgcccatgtc

SEQ ID NO: 2735 - DNA, 20 bp, synthetic construct
  source 1..20: mol_type = other DNA
cccacacaatgtgctacctt

SEQ ID NO: 2736 - DNA, 20 bp, synthetic construct
  source 1..20: mol_type = other DNA
ccgcctgatggctttctcct

SEQ ID NO: 2737 - DNA, 20 bp, synthetic construct
  source 1..20: mol_type = other DNA
aagcgactgggctgttctgg

SEQ ID NO: 2738 - DNA, 20 bp, synthetic construct
  source 1..20: mol_type = other DNA
tagccactgccgtgtttcta

SEQ ID NO: 2739 - DNA, 20 bp, synthetic construct
  source 1..20: mol_type = other DNA
acaaggtatcacatcccggc

SEQ ID NO: 2740 - DNA, 20 bp, synthetic construct
  source 1..20: mol_type = other DNA
gcaatattttccgtgccccc

SEQ ID NO: 2741 - DNA, 20 bp, synthetic construct
  source 1..20: mol_type = other DNA
atgggtggaatgtgtcagac

SEQ ID NO: 2742 - DNA, 20 bp, synthetic construct
  source 1..20: mol_type = other DNA
tcgagagtagagcctgggcc

SEQ ID NO: 2743 - DNA, 20 bp, synthetic construct
  source 1..20: mol_type = other DNA
tagaattcctcgggcaagcc

SEQ ID NO: 2744 - DNA, 20 bp, synthetic construct
  source 1..20: mol_type = other DNA
aagggtacgctgtctgcacc

SEQ ID NO: 2745 - DNA, 20 bp, synthetic construct
  source 1..20: mol_type = other DNA
taagtcctggcagggttaga

SEQ ID NO: 2746 - DNA, 20 bp, synthetic construct
  source 1..20: mol_type = other DNA
cagcaatcccaaccggacag

SEQ ID NO: 2747 - DNA, 20 bp, synthetic construct
  source 1..20: mol_type = other DNA
ggaaaagaatcggcaatccc

SEQ ID NO: 2748 - DNA, 20 bp, synthetic construct
  source 1..20: mol_type = other DNA
tttcctggcatactcgcagt

SEQ ID NO: 2749 - DNA, 20 bp, synthetic construct
  source 1..20: mol_type = other DNA
cacccaaatcatgcaatggc

SEQ ID NO: 2750 - DNA, 20 bp, synthetic construct
  source 1..20: mol_type = other DNA
gtatatagtcagagagcctc

SEQ ID NO: 2751 - DNA, 20 bp, synthetic construct
  source 1..20: mol_type = other DNA
gctaaccagtcaaaggcctt

SEQ ID NO: 2752 - DNA, 20 bp, synthetic construct
  source 1..20: mol_type = other DNA
ggctaacagggatctgatcc

SEQ ID NO: 2753 - DNA, 20 bp, synthetic construct
  source 1..20: mol_type = other DNA
agatggttaggctcccaacg

SEQ ID NO: 2754 - DNA, 20 bp, synthetic construct
  source 1..20: mol_type = other DNA
ggtaatacagaggcatcacg

SEQ ID NO: 2755 - DNA, 20 bp, synthetic construct
  source 1..20: mol_type = other DNA
cctcactctgagcagatagt

SEQ ID NO: 2756 - DNA, 20 bp, synthetic construct
  source 1..20: mol_type = other DNA
tcgctgccgttcacctgcgc

SEQ ID NO: 2757 - DNA, 20 bp, synthetic construct
  source 1..20: mol_type = other DNA
ctgacaaccccgtctcatat

SEQ ID NO: 2758 - DNA, 20 bp, synthetic construct
  source 1..20: mol_type = other DNA
tgtcacacaacagccccacg

SEQ ID NO: 2759 - DNA, 20 bp, synthetic construct
  source 1..20: mol_type = other DNA
tgcgatgaggacccaatgat

SEQ ID NO: 2760 - DNA, 20 bp, synthetic construct
  source 1..20: mol_type = other DNA
ctggctggtaattggccacc

SEQ ID NO: 2761 - DNA, 20 bp, synthetic construct
  source 1..20: mol_type = other DNA
catgtcgggaaggctcccac

SEQ ID NO: 2762 - DNA, 20 bp, synthetic construct
  source 1..20: mol_type = other DNA
taagtgcctcgcctccagca

SEQ ID NO: 2763 - DNA, 20 bp, synthetic construct
  source 1..20: mol_type = other DNA
ccgataaaactaccactccc

SEQ ID NO: 2764 - DNA, 20 bp, synthetic construct
  source 1..20: mol_type = other DNA
agactcaatagaatgacggt

SEQ ID NO: 2765 - DNA, 20 bp, synthetic construct
  source 1..20: mol_type = other DNA
ggctccccaatgtagaccac

SEQ ID NO: 2766 - DNA, 20 bp, synthetic construct
  source 1..20: mol_type = other DNA
ctcccagcatcccgatggca

SEQ ID NO: 2767 - DNA, 20 bp, synthetic construct
  source 1..20: mol_type = other DNA
cccactagtacaacctgtaa

SEQ ID NO: 2768 - DNA, 20 bp, synthetic construct
  source 1..20: mol_type = other DNA
aaagactgccgctgcaggag

SEQ ID NO: 2769 - DNA, 20 bp, synthetic construct
  source 1..20: mol_type = other DNA
atgccatgaccacgctgtcc

SEQ ID NO: 2770 - DNA, 20 bp, synthetic construct
  source 1..20: mol_type = other DNA
gtagcagaacaggtgattac

SEQ ID NO: 2771 - DNA, 20 bp, synthetic construct
  source 1..20: mol_type = other DNA
tggccacactcggctgtatt

SEQ ID NO: 2772 - DNA, 20 bp, synthetic construct
  source 1..20: mol_type = other DNA
gactagtactatctatcaat

SEQ ID NO: 2773 - DNA, 20 bp, synthetic construct
  source 1..20: mol_type = other DNA
tgtcacaacctgtaagatcc

SEQ ID NO: 2774 - DNA, 20 bp, synthetic construct
  source 1..20: mol_type = other DNA
aagatgcgggaaagtccata

SEQ ID NO: 2775 - DNA, 20 bp, synthetic construct
  source 1..20: mol_type = other DNA
ctcatcgcctaccgtcttaa

SEQ ID NO: 2776 - DNA, 20 bp, synthetic construct
  source 1..20: mol_type = other DNA
gcggcccgagagccccccca

SEQ ID NO: 2777 - DNA, 20 bp, synthetic construct
  source 1..20: mol_type = other DNA
cctggttcattgcttaaagg

SEQ ID NO: 2778 - DNA, 20 bp, synthetic construct
  source 1..20: mol_type = other DNA
gccgaattctcaagtgagtc

SEQ ID NO: 2779 - DNA, 20 bp, synthetic construct
  source 1..20: mol_type = other DNA
gtccactcaccgcatccgcc

SEQ ID NO: 2780 - DNA, 20 bp, synthetic construct
  source 1..20: mol_type = other DNA
gcggtacccctgggcctgca

SEQ ID NO: 2781 - DNA, 20 bp, synthetic construct
  source 1..20: mol_type = other DNA
gcccgacgggaagcttgcaa

SEQ ID NO: 2782 - DNA, 20 bp, synthetic construct
  source 1..20: mol_type = other DNA
tccaggtagggaccccggag

SEQ ID NO: 2783 - DNA, 20 bp, synthetic construct
  source 1..20: mol_type = other DNA
agcaccgtgtagatgccacc

SEQ ID NO: 2784 - DNA, 20 bp, synthetic construct
  source 1..20: mol_type = other DNA
gttgcaggtatcccagagct

SEQ ID NO: 2785 - DNA, 20 bp, synthetic construct
  source 1..20: mol_type = other DNA
tgctacaggcagtcgccggg

SEQ ID NO: 2786 - DNA, 20 bp, synthetic construct
  source 1..20: mol_type = other DNA
gctgccgccctttccatgca

SEQ ID NO: 2787 - DNA, 20 bp, synthetic construct
  source 1..20: mol_type = other DNA
gattcgagccttgctctgag

SEQ ID NO: 2788 - DNA, 20 bp, synthetic construct
  source 1..20: mol_type = other DNA
tgagcagatagttgagccga

SEQ ID NO: 2789 - DNA, 20 bp, synthetic construct
  source 1..20: mol_type = other DNA
acttttccttcaccgtgttg

SEQ ID NO: 2790 - DNA, 20 bp, synthetic construct
  source 1..20: mol_type = other DNA
ttcggcggatggtggtcagg

SEQ ID NO: 2791 - DNA, 20 bp, synthetic construct
  source 1..20: mol_type = other DNA
gagaggaactccgggtggaa

SEQ ID NO: 2792 - DNA, 20 bp, synthetic construct
  source 1..20: mol_type = other DNA
cgccggtcaagaatgtagat

SEQ ID NO: 2793 - DNA, 20 bp, synthetic construct
  source 1..20: mol_type = other DNA
cggttccgctggatgatacg

SEQ ID NO: 2794 - DNA, 20 bp, synthetic construct
  source 1..20: mol_type = other DNA
cgacggtggcaccgaggctg

SEQ ID NO: 2795 - DNA, 20 bp, synthetic construct
  source 1..20: mol_type = other DNA
gtgcacggatgttgcgccgg

SEQ ID NO: 2796 - DNA, 20 bp, synthetic construct
  source 1..20: mol_type = other DNA
ttacgctcctcgcccaggga

SEQ ID NO: 2797 - DNA, 20 bp, synthetic construct
  source 1..20: mol_type = other DNA
ccgcagagtaatggcagatt

SEQ ID NO: 2798 - DNA, 20 bp, synthetic construct
  source 1..20: mol_type = other DNA
ccattcgcagggacaccacg

SEQ ID NO: 2799 - DNA, 20 bp, synthetic construct
  source 1..20: mol_type = other DNA
tgaaatggaggaccatctgc

SEQ ID NO: 2800 - DNA, 20 bp, synthetic construct
  source 1..20: mol_type = other DNA
ttgggaataagccaggttag

SEQ ID NO: 2801 - DNA, 20 bp, synthetic construct
  source 1..20: mol_type = other DNA
caaaccaagcggtgcagaca

SEQ ID NO: 2802 - DNA, 20 bp, synthetic construct
  source 1..20: mol_type = other DNA
caactcagagttccgggccc

SEQ ID NO: 2803 - DNA, 20 bp, synthetic construct
  source 1..20: mol_type = other DNA
aagtcaaacgaaccatccct

SEQ ID NO: 2804 - DNA, 20 bp, synthetic construct
  source 1..20: mol_type = other DNA
ccaggtttgcacgcagaaat

SEQ ID NO: 2805 - DNA, 20 bp, synthetic construct
  source 1..20: mol_type = other DNA
tagaccatgctgttagggtc

SEQ ID NO: 2806 - DNA, 20 bp, synthetic construct
  source 1..20: mol_type = other DNA
taatagctcaggccctcagc

SEQ ID NO: 2807 - DNA, 20 bp, synthetic construct
  source 1..20: mol_type = other DNA
cctctgactaacttaggact

SEQ ID NO: 2808 - DNA, 20 bp, synthetic construct
  source 1..20: mol_type = other DNA
cccctcatggccaatccagc

SEQ ID NO: 2809 - DNA, 20 bp, synthetic construct
  source 1..20: mol_type = other DNA
ggtctgaaggaattaggcac

SEQ ID NO: 2810 - DNA, 20 bp, synthetic construct
  source 1..20: mol_type = other DNA
gatggcaggctgtccacccg

SEQ ID NO: 2811 - DNA, 20 bp, synthetic construct
  source 1..20: mol_type = other DNA
gtctgtccattcgcccatgt

SEQ ID NO: 2812 - DNA, 20 bp, synthetic construct
  source 1..20: mol_type = other DNA
gcccacacaatgtgctacct

SEQ ID NO: 2813 - DNA, 20 bp, synthetic construct
  source 1..20: mol_type = other DNA
ctgccgcctgatggctttct

SEQ ID NO: 2814 - DNA, 20 bp, synthetic construct
  source 1..20: mol_type = other DNA
gaagcgactgggctgttctg

SEQ ID NO: 2815 - DNA, 20 bp, synthetic construct
  source 1..20: mol_type = other DNA
ctagccactgccgtgtttct

SEQ ID NO: 2816 - DNA, 20 bp, synthetic construct
  source 1..20: mol_type = other DNA
cacaaggtatcacatcccgg

SEQ ID NO: 2817 - DNA, 20 bp, synthetic construct
  source 1..20: mol_type = other DNA
tgcaatattttccgtgcccc

SEQ ID NO: 2818 - DNA, 20 bp, synthetic construct
  source 1..20: mol_type = other DNA
gtttcaggtatgggtggaat

SEQ ID NO: 2819 - DNA, 20 bp, synthetic construct
  source 1..20: mol_type = other DNA
catcgagagtagagcctggg

SEQ ID NO: 2820 - DNA, 20 bp, synthetic construct
  source 1..20: mol_type = other DNA
ctagaattcctcgggcaagc

SEQ ID NO: 2821 - DNA, 20 bp, synthetic construct
  source 1..20: mol_type = other DNA
caagggtacgctgtctgcac

SEQ ID NO: 2822 - DNA, 20 bp, synthetic construct
  source 1..20: mol_type = other DNA
ctaagtcctggcagggttag

SEQ ID NO: 2823 - DNA, 20 bp, synthetic construct
  source 1..20: mol_type = other DNA
gcagcaatcccaaccggaca

SEQ ID NO: 2824 - DNA, 20 bp, synthetic construct
  source 1..20: mol_type = other DNA
gggaaaagaatcggcaatcc

SEQ ID NO: 2825 - DNA, 20 bp, synthetic construct
  source 1..20: mol_type = other DNA
ttttcctggcatactcgcag

SEQ ID NO: 2826 - DNA, 20 bp, synthetic construct
  source 1..20: mol_type = other DNA
gccacccaaatcatgcaatg

SEQ ID NO: 2827 - DNA, 20 bp, synthetic construct
  source 1..20: mol_type = other DNA
gagtatatagtcagagagcc

SEQ ID NO: 2828 - DNA, 20 bp, synthetic construct
  source 1..20: mol_type = other DNA
gagctaaccagtcaaaggcc

SEQ ID NO: 2829 - DNA, 20 bp, synthetic construct
  source 1..20: mol_type = other DNA
tggctaacagggatctgatc

SEQ ID NO: 2830 - DNA, 20 bp, synthetic construct
  source 1..20: mol_type = other DNA
tagatggttaggctcccaac

SEQ ID NO: 2831 - DNA, 20 bp, synthetic construct
  source 1..20: mol_type = other DNA
ttaggtaatacagaggcatc

SEQ ID NO: 2832 - DNA, 20 bp, synthetic construct
  source 1..20: mol_type = other DNA
gcctcactctgagcagatag

SEQ ID NO: 2833 - DNA, 20 bp, synthetic construct
  source 1..20: mol_type = other DNA
ctcgctgccgttcacctgcg

SEQ ID NO: 2834 - DNA, 20 bp, synthetic construct
  source 1..20: mol_type = other DNA
cctgacaaccccgtctcata

SEQ ID NO: 2835 - DNA, 20 bp, synthetic construct
  source 1..20: mol_type = other DNA
tagcagtgtcacacaacagc

SEQ ID NO: 2836 - DNA, 20 bp, synthetic construct
  source 1..20: mol_type = other DNA
ttgcgatgaggacccaatga

SEQ ID NO: 2837 - DNA, 20 bp, synthetic construct
  source 1..20: mol_type = other DNA
tctggctggtaattggccac

SEQ ID NO: 2838 - DNA, 20 bp, synthetic construct
  source 1..20: mol_type = other DNA
aggtccaatccatacctgcg

SEQ ID NO: 2839 - DNA, 20 bp, synthetic construct
  source 1..20: mol_type = other DNA
ctaagtgcctcgcctccagc

SEQ ID NO: 2840 - DNA, 20 bp, synthetic construct
  source 1..20: mol_type = other DNA
cccgataaaactaccactcc

SEQ ID NO: 2841 - DNA, 20 bp, synthetic construct
  source 1..20: mol_type = other DNA
tagactcaatagaatgacgg

SEQ ID NO: 2842 - DNA, 20 bp, synthetic construct
  source 1..20: mol_type = other DNA
tggctccccaatgtagacca

SEQ ID NO: 2843 - DNA, 20 bp, synthetic construct
  source 1..20: mol_type = other DNA
actcccagcatcccgatggc

SEQ ID NO: 2844 - DNA, 20 bp, synthetic construct
  source 1..20: mol_type = other DNA
tcccactagtacaacctgta

SEQ ID NO: 2845 - DNA, 20 bp, synthetic construct
  source 1..20: mol_type = other DNA
gaaagactgccgctgcagga

SEQ ID NO: 2846 - DNA, 20 bp, synthetic construct
  source 1..20: mol_type = other DNA
gatgccatgaccacgctgtc

SEQ ID NO: 2847 - DNA, 20 bp, synthetic construct
  source 1..20: mol_type = other DNA
cgctgtagcagaacaggtga

SEQ ID NO: 2848 - DNA, 20 bp, synthetic construct
  source 1..20: mol_type = other DNA
ttggccacactcggctgtat

SEQ ID NO: 2849 - DNA, 20 bp, synthetic construct
  source 1..20: mol_type = other DNA
agactagtactatctatcaa

SEQ ID NO: 2850 - DNA, 20 bp, synthetic construct
  source 1..20: mol_type = other DNA
ttgtcacaacctgtaagatc

SEQ ID NO: 2851 - DNA, 20 bp, synthetic construct
  source 1..20: mol_type = other DNA
caagatgcgggaaagtccat

SEQ ID NO: 2852 - DNA, 20 bp, synthetic construct
  source 1..20: mol_type = other DNA
cctcatcgcctaccgtctta

SEQ ID NO: 2853 - DNA, 20 bp, synthetic construct
  source 1..20: mol_type = other DNA
agcggcccgagagccccccc

SEQ ID NO: 2854 - DNA, 20 bp, synthetic construct
  source 1..20: mol_type = other DNA
gcctggttcattgcttaaag

SEQ ID NO: 2855 - DNA, 20 bp, synthetic construct
  source 1..20: mol_type = other DNA
ggccgaattctcaagtgagt

SEQ ID NO: 2856 - DNA, 20 bp, synthetic construct
  source 1..20: mol_type = other DNA
gggtccactcaccgcatccg

SEQ ID NO: 2857 - DNA, 20 bp, synthetic construct
  source 1..20: mol_type = other DNA
tagcggtacccctgggcctg

SEQ ID NO: 2858 - DNA, 20 bp, synthetic construct
  source 1..20: mol_type = other DNA
tgcccgacgggaagcttgca

SEQ ID NO: 2859 - DNA, 20 bp, synthetic construct
  source 1..20: mol_type = other DNA
ctccaggtagggaccccgga

SEQ ID NO: 2860 - DNA, 20 bp, synthetic construct
  source 1..20: mol_type = other DNA
cagcaccgtgtagatgccac

SEQ ID NO: 2861 - DNA, 20 bp, synthetic construct
  source 1..20: mol_type = other DNA
atgttgcaggtatcccagag

SEQ ID NO: 2862 - DNA, 20 bp, synthetic construct
  source 1..20: mol_type = other DNA
ttgctacaggcagtcgccgg

SEQ ID NO: 2863 - DNA, 20 bp, synthetic construct
  source 1..20: mol_type = other DNA
ggctgccgccctttccatgc

SEQ ID NO: 2864 - DNA, 20 bp, synthetic construct
  source 1..20: mol_type = other DNA
ggattcgagccttgctctga

SEQ ID NO: 2865 - DNA, 20 bp, synthetic construct
  source 1..20: mol_type = other DNA
ctgagcagatagttgagccg

SEQ ID NO: 2866 - DNA, 20 bp, synthetic construct
  source 1..20: mol_type = other DNA
agcttcctcccgaacttttc

SEQ ID NO: 2867 - DNA, 20 bp, synthetic construct
  source 1..20: mol_type = other DNA
attcggcggatggtggtcag

SEQ ID NO: 2868 - DNA, 20 bp, synthetic construct
  source 1..20: mol_type = other DNA
acggacaaactcctcatagt

SEQ ID NO: 2869 - DNA, 20 bp, synthetic construct
  source 1..20: mol_type = other DNA
accgccggtcaagaatgtag

SEQ ID NO: 2870 - DNA, 20 bp, synthetic construct
  source 1..20: mol_type = other DNA
gcggttccgctggatgatac

SEQ ID NO: 2871 - DNA, 20 bp, synthetic construct
  source 1..20: mol_type = other DNA
gcgacggtggcaccgaggct

SEQ ID NO: 2872 - DNA, 20 bp, synthetic construct
  source 1..20: mol_type = other DNA
ggtgcacggatgttgcgccg

SEQ ID NO: 2873 - DNA, 20 bp, synthetic construct
  source 1..20: mol_type = other DNA
tagttacgctcctcgcccag

SEQ ID NO: 2874 - DNA, 20 bp, synthetic construct
  source 1..20: mol_type = other DNA
accgcagagtaatggcagat

SEQ ID NO: 2875 - DNA, 20 bp, synthetic construct
  source 1..20: mol_type = other DNA
cccattcgcagggacaccac

SEQ ID NO: 2876 - DNA, 20 bp, synthetic construct
  source 1..20: mol_type = other DNA
ttgaaatggaggaccatctg

SEQ ID NO: 2877 - DNA, 20 bp, synthetic construct
  source 1..20: mol_type = other DNA
gttgggaataagccaggtta

SEQ ID NO: 2878 - DNA, 20 bp, synthetic construct
  source 1..20: mol_type = other DNA
tgcaaaccaagcggtgcaga

SEQ ID NO: 2879 - DNA, 20 bp, synthetic construct
  source 1..20: mol_type = other DNA
acaactcagagttccgggcc

SEQ ID NO: 2880 - DNA, 20 bp, synthetic construct
  source 1..20: mol_type = other DNA
taagtcaaacgaaccatccc

SEQ ID NO: 2881 - DNA, 20 bp, synthetic construct
  source 1..20: mol_type = other DNA
cccaggtttgcacgcagaaa

SEQ ID NO: 2882 - DNA, 20 bp, synthetic construct
  source 1..20: mol_type = other DNA
cctagaccatgctgttaggg

SEQ ID NO: 2883 - DNA, 20 bp, synthetic construct
  source 1..20: mol_type = other DNA
ctaatagctcaggccctcag

SEQ ID NO: 2884 - DNA, 20 bp, synthetic construct
  source 1..20: mol_type = other DNA
gcctctgactaacttaggac

SEQ ID NO: 2885 - DNA, 20 bp, synthetic construct
  source 1..20: mol_type = other DNA
gggagaccccctcatggcca

SEQ ID NO: 2886 - DNA, 20 bp, synthetic construct
  source 1..20: mol_type = other DNA
ttggtctgaaggaattaggc

SEQ ID NO: 2887 - DNA, 20 bp, synthetic construct
  source 1..20: mol_type = other DNA
cgatggcaggctgtccaccc

SEQ ID NO: 2888 - DNA, 20 bp, synthetic construct
  source 1..20: mol_type = other DNA
tgtctgtccattcgcccatg

SEQ ID NO: 2889 - DNA, 20 bp, synthetic construct
  source 1..20: mol_type = other DNA
cgcccacacaatgtgctacc

SEQ ID NO: 2890 - DNA, 20 bp, synthetic construct
  source 1..20: mol_type = other DNA
cctgccgcctgatggctttc

SEQ ID NO: 2891 - DNA, 20 bp, synthetic construct
  source 1..20: mol_type = other DNA
ggaagcgactgggctgttct

SEQ ID NO: 2892 - DNA, 20 bp, synthetic construct
  source 1..20: mol_type = other DNA
ttctagccactgccgtgttt

SEQ ID NO: 2893 - DNA, 20 bp, synthetic construct
  source 1..20: mol_type = other DNA
gcacaaggtatcacatcccg

SEQ ID NO: 2894 - DNA, 20 bp, synthetic construct
  source 1..20: mol_type = other DNA
ttgcaatattttccgtgccc

SEQ ID NO: 2895 - DNA, 20 bp, synthetic construct
  source 1..20: mol_type = other DNA
tgtagtttcaggtatgggtg

SEQ ID NO: 2896 - DNA, 20 bp, synthetic construct
  source 1..20: mol_type = other DNA
gcatcgagagtagagcctgg

SEQ ID NO: 2897 - DNA, 20 bp, synthetic construct
  source 1..20: mol_type = other DNA
cctagaattcctcgggcaag

SEQ ID NO: 2898 - DNA, 20 bp, synthetic construct
  source 1..20: mol_type = other DNA
tcaagggtacgctgtctgca

SEQ ID NO: 2899 - DNA, 20 bp, synthetic construct
  source 1..20: mol_type = other DNA
tctaagtcctggcagggtta

SEQ ID NO: 2900 - DNA, 20 bp, synthetic construct
  source 1..20: mol_type = other DNA
tgcagcaatcccaaccggac

SEQ ID NO: 2901 - DNA, 20 bp, synthetic construct
  source 1..20: mol_type = other DNA
tgggaaaagaatcggcaatc

SEQ ID NO: 2902 - DNA, 20 bp, synthetic construct
  source 1..20: mol_type = other DNA
gttttcctggcatactcgca

SEQ ID NO: 2903 - DNA, 20 bp, synthetic construct
  source 1..20: mol_type = other DNA
gctaacataaagtgttctgg

SEQ ID NO: 2904 - DNA, 20 bp, synthetic construct
  source 1..20: mol_type = other DNA
cctccagagtatatagtcag

SEQ ID NO: 2905 - DNA, 20 bp, synthetic construct
  source 1..20: mol_type = other DNA
agagctaaccagtcaaaggc

SEQ ID NO: 2906 - DNA, 20 bp, synthetic construct
  source 1..20: mol_type = other DNA
tataagtctcctcagctact

SEQ ID NO: 2907 - DNA, 20 bp, synthetic construct
  source 1..20: mol_type = other DNA
ctagatggttaggctcccaa

SEQ ID NO: 2908 - DNA, 20 bp, synthetic construct
  source 1..20: mol_type = other DNA
ggatgtcttaggtaatacag

SEQ ID NO: 2909 - DNA, 20 bp, synthetic construct
  source 1..20: mol_type = other DNA
ctccctagttataaactgct

SEQ ID NO: 2910 - DNA, 20 bp, synthetic construct
  source 1..20: mol_type = other DNA
tgctcgctgccgttcacctg

SEQ ID NO: 2911 - DNA, 20 bp, synthetic construct
  source 1..20: mol_type = other DNA
tcctgacaaccccgtctcat

SEQ ID NO: 2912 - DNA, 20 bp, synthetic construct
  source 1..20: mol_type = other DNA
gctagcagtgtcacacaaca

SEQ ID NO: 2913 - DNA, 20 bp, synthetic construct
  source 1..20: mol_type = other DNA
tttgcgatgaggacccaatg

SEQ ID NO: 2914 - DNA, 20 bp, synthetic construct
  source 1..20: mol_type = other DNA
ctctggctggtaattggcca

SEQ ID NO: 2915 - DNA, 20 bp, synthetic construct
  source 1..20: mol_type = other DNA
gaggtccaatccatacctgc

SEQ ID NO: 2916 - DNA, 20 bp, synthetic construct
  source 1..20: mol_type = other DNA
cctaagtgcctcgcctccag

SEQ ID NO: 2917 - DNA, 20 bp, synthetic construct
  source 1..20: mol_type = other DNA
gcccgataaaactaccactc

SEQ ID NO: 2918 - DNA, 20 bp, synthetic construct
  source 1..20: mol_type = other DNA
ctagactcaatagaatgacg

SEQ ID NO: 2919 - DNA, 20 bp, synthetic construct
  source 1..20: mol_type = other DNA
gaaatggctccccaatgtag

SEQ ID NO: 2920 - DNA, 20 bp, synthetic construct
  source 1..20: mol_type = other DNA
caactcccagcatcccgatg

SEQ ID NO: 2921 - DNA, 20 bp, synthetic construct
  source 1..20: mol_type = other DNA
ttcccactagtacaacctgt

SEQ ID NO: 2922 - DNA, 20 bp, synthetic construct
  source 1..20: mol_type = other DNA
atgtgtttggcaggaccaat

SEQ ID NO: 2923 - DNA, 20 bp, synthetic construct
  source 1..20: mol_type = other DNA
ggatgccatgaccacgctgt

SEQ ID NO: 2924 - DNA, 20 bp, synthetic construct
  source 1..20: mol_type = other DNA
gcgctgtagcagaacaggtg

SEQ ID NO: 2925 - DNA, 20 bp, synthetic construct
  source 1..20: mol_type = other DNA
cttggccacactcggctgta

SEQ ID NO: 2926 - DNA, 20 bp, synthetic construct
  source 1..20: mol_type = other DNA
acagactagtactatctatc

SEQ ID NO: 2927 - DNA, 20 bp, synthetic construct
  source 1..20: mol_type = other DNA
gccaaggtccatcattctac

SEQ ID NO: 2928 - DNA, 20 bp, synthetic construct
  source 1..20: mol_type = other DNA
ccaagatgcgggaaagtcca

SEQ ID NO: 2929 - DNA, 20 bp, synthetic construct
  source 1..20: mol_type = other DNA
ccctcatcgcctaccgtctt

SEQ ID NO: 2930 - DNA, 20 bp, synthetic construct
  source 1..20: mol_type = other DNA
ctctcccagcggcccgagag

SEQ ID NO: 2931 - DNA, 20 bp, synthetic construct
  source 1..20: mol_type = other DNA
ggcctggttcattgcttaaa

SEQ ID NO: 2932 - DNA, 20 bp, synthetic construct
  source 1..20: mol_type = other DNA
gggccgaattctcaagtgag

SEQ ID NO: 2933 - DNA, 20 bp, synthetic construct
  source 1..20: mol_type = other DNA
ttagctcctggctaagcaga

SEQ ID NO: 2934 - DNA, 20 bp, synthetic construct
  source 1..20: mol_type = other DNA
gtagcggtacccctgggcct

SEQ ID NO: 2935 - DNA, 20 bp, synthetic construct
  source 1..20: mol_type = other DNA
gtgtagatgccacccacctt

SEQ ID NO: 2936 - DNA, 20 bp, synthetic construct
  source 1..20: mol_type = other DNA
ctcccatcctagggcccagc

SEQ ID NO: 2937 - DNA, 20 bp, synthetic construct
  source 1..20: mol_type = other DNA
gatgccacccactgtgggcc

SEQ ID NO: 2938 - DNA, 20 bp, synthetic construct
  source 1..20: mol_type = other DNA
aaatgtcagctattattagg

SEQ ID NO: 2939 - DNA, 20 bp, synthetic construct
  source 1..20: mol_type = other DNA
cagaaatgtcagctattatt

SEQ ID NO: 2940 - DNA, 20 bp, synthetic construct
  source 1..20: mol_type = other DNA
ttccagaaatgtcagctatt

SEQ ID NO: 2941 - DNA, 20 bp, synthetic construct
  source 1..20: mol_type = other DNA
gccttccagaaatgtcagct

SEQ ID NO: 2942 - DNA, 20 bp, synthetic construct
  source 1..20: mol_type = other DNA
tgcccctgacctataattat

SEQ ID NO: 2943 - DNA, 20 bp, synthetic construct
  source 1..20: mol_type = other DNA
ccaaaagtaaattccgtcta

SEQ ID NO: 2944 - DNA, 20 bp, synthetic construct
  source 1..20: mol_type = other DNA
caaaagtaaattccgtctac

SEQ ID NO: 2945 - DNA, 20 bp, synthetic construct
  source 1..20: mol_type = other DNA
gtctacaggattttctagaa

SEQ ID NO: 2946 - DNA, 20 bp, synthetic construct
  source 1..20: mol_type = other DNA
gattttctagaatacaagct

SEQ ID NO: 2947 - DNA, 20 bp, synthetic construct
  source 1..20: mol_type = other DNA
aattccgtctacaggatttt

SEQ ID NO: 2948 - DNA, 20 bp, synthetic construct
  source 1..20: mol_type = other DNA
ctacaggattttctagaata

SEQ ID NO: 2949 - DNA, 20 bp, synthetic construct
  source 1..20: mol_type = other DNA
aaaagtaaattccgtctaca

SEQ ID NO: 2950 - DNA, 20 bp, synthetic construct
  source 1..20: mol_type = other DNA
tgcccaaaagtaaattccgt

SEQ ID NO: 2951 - DNA, 20 bp, synthetic construct
  source 1..20: mol_type = other DNA
aaagtaaattccgtctacag

SEQ ID NO: 2952 - DNA, 20 bp, synthetic construct
  source 1..20: mol_type = other DNA
aggattttctagaatacaag

SEQ ID NO: 2953 - DNA, 20 bp, synthetic construct
  source 1..20: mol_type = other DNA
tctacaggattttctagaat

SEQ ID NO: 2954 - DNA, 20 bp, synthetic construct
  source 1..20: mol_type = other DNA
attccgtctacaggattttc

SEQ ID NO: 2955 - DNA, 20 bp, synthetic construct
  source 1..20: mol_type = other DNA
ttgcccaaaagtaaattccg

SEQ ID NO: 2956 - DNA, 20 bp, synthetic construct
  source 1..20: mol_type = other DNA
ggattttctagaatacaagc

SEQ ID NO: 2957 - DNA, 20 bp, synthetic construct
  source 1..20: mol_type = other DNA
acatggcaagccttccagaa

SEQ ID NO: 2958 - DNA, 20 bp, synthetic construct
  source 1..20: mol_type = other DNA
atgtcagctattattaggac

SEQ ID NO: 2959 - DNA, 20 bp, synthetic construct
  source 1..20: mol_type = other DNA
gttcacaagcacaagtataa

SEQ ID NO: 2960 - DNA, 20 bp, synthetic construct
  source 1..20: mol_type = other DNA
gctactgcaaatggctaaca

SEQ ID NO: 2961 - DNA, 20 bp, synthetic construct
  source 1..20: mol_type = other DNA
atggcaagccttccagaaat

SEQ ID NO: 2962 - DNA, 20 bp, synthetic construct
  source 1..20: mol_type = other DNA
ttcttgcctaatattacttg

SEQ ID NO: 2963 - DNA, 20 bp, synthetic construct
  source 1..20: mol_type = other DNA
taatattacttgcttaggtt

SEQ ID NO: 2964 - DNA, 20 bp, synthetic construct
  source 1..20: mol_type = other DNA
caagtataagtctcctcagc

SEQ ID NO: 2965 - DNA, 20 bp, synthetic construct
  source 1..20: mol_type = other DNA
tcttgcctaatattacttgc

SEQ ID NO: 2966 - DNA, 20 bp, synthetic construct
  source 1..20: mol_type = other DNA
ataagtctcctcagctactg

SEQ ID NO: 2967 - DNA, 20 bp, synthetic construct
  source 1..20: mol_type = other DNA
tgtcagctattattaggact

SEQ ID NO: 2968 - DNA, 20 bp, synthetic construct
  source 1..20: mol_type = other DNA
aggttcacaagcacaagtat

SEQ ID NO: 2969 - DNA, 20 bp, synthetic construct
  source 1..20: mol_type = other DNA
agtctcctcagctactgcaa

SEQ ID NO: 2970 - DNA, 20 bp, synthetic construct
  source 1..20: mol_type = other DNA
caagccttccagaaatgtca

SEQ ID NO: 2971 - DNA, 20 bp, synthetic construct
  source 1..20: mol_type = other DNA
ggcaagccttccagaaatgt

SEQ ID NO: 2972 - DNA, 20 bp, synthetic construct
  source 1..20: mol_type = other DNA
caagcacaagtataagtctc

SEQ ID NO: 2973 - DNA, 20 bp, synthetic construct
  source 1..20: mol_type = other DNA
tgcttaggttcacaagcaca

SEQ ID NO: 2974 - DNA, 20 bp, synthetic construct
  source 1..20: mol_type = other DNA
aagccttccagaaatgtcag

SEQ ID NO: 2975 - DNA, 20 bp, synthetic construct
  source 1..20: mol_type = other DNA
taagtctcctcagctactgc

SEQ ID NO: 2976 - DNA, 20 bp, synthetic construct
  source 1..20: mol_type = other DNA
agtataagtctcctcagcta

SEQ ID NO: 2977 - DNA, 20 bp, synthetic construct
  source 1..20: mol_type = other DNA
ccttcttgcctaatattact

SEQ ID NO: 2978 - DNA, 20 bp, synthetic construct
  source 1..20: mol_type = other DNA
acagggatctgatccacact

SEQ ID NO: 2979 - DNA, 20 bp, synthetic construct
  source 1..20: mol_type = other DNA
gtcagctattattaggactt

SEQ ID NO: 2980 - DNA, 20 bp, synthetic construct
  source 1..20: mol_type = other DNA
gcaagccttccagaaatgtc

SEQ ID NO: 2981 - DNA, 20 bp, synthetic construct
  source 1..20: mol_type = other DNA
cagctactgcaaatggctaa

SEQ ID NO: 2982 - DNA, 20 bp, synthetic construct
  source 1..20: mol_type = other DNA
tcagctactgcaaatggcta

SEQ ID NO: 2983 - DNA, 20 bp, synthetic construct
  source 1..20: mol_type = other DNA
gcaaatggctaacagggatc

SEQ ID NO: 2984 - DNA, 20 bp, synthetic construct
  source 1..20: mol_type = other DNA
catggcaagccttccagaaa

SEQ ID NO: 2985 - DNA, 20 bp, synthetic construct
  source 1..20: mol_type = other DNA
ctcagctactgcaaatggct

SEQ ID NO: 2986 - DNA, 20 bp, synthetic construct
  source 1..20: mol_type = other DNA
gtctcctcagctactgcaaa

SEQ ID NO: 2987 - DNA, 20 bp, synthetic construct
  source 1..20: mol_type = other DNA
cttgcctaatattacttgct

SEQ ID NO: 2988 - DNA, 20 bp, synthetic construct
  source 1..20: mol_type = other DNA
acaagcacaagtataagtct

SEQ ID NO: 2989 - DNA, 20 bp, synthetic construct
  source 1..20: mol_type = other DNA
ctaatattacttgcttaggt

SEQ ID NO: 2990 - DNA, 20 bp, synthetic construct
  source 1..20: mol_type = other DNA
aagtctcctcagctactgca

SEQ ID NO: 2991 - DNA, 20 bp, synthetic construct
  source 1..20: mol_type = other DNA
ttgcctaatattacttgctt

SEQ ID NO: 2992 - DNA, 20 bp, synthetic construct
  source 1..20: mol_type = other DNA
ttgcttaggttcacaagcac

SEQ ID NO: 2993 - DNA, 20 bp, synthetic construct
  source 1..20: mol_type = other DNA
cacaagcacaagtataagtc

SEQ ID NO: 2994 - DNA, 20 bp, synthetic construct
  source 1..20: mol_type = other DNA
tgcctaatattacttgctta

SEQ ID NO: 2995 - DNA, 20 bp, synthetic construct
  source 1..20: mol_type = other DNA
agccttccagaaatgtcagc

SEQ ID NO: 2996 - DNA, 20 bp, synthetic construct
  source 1..20: mol_type = other DNA
ccttccagaaatgtcagcta

SEQ ID NO: 2997 - DNA, 20 bp, synthetic construct
  source 1..20: mol_type = other DNA
cttccagaaatgtcagctat

SEQ ID NO: 2998 - DNA, 20 bp, synthetic construct
  source 1..20: mol_type = other DNA
ctgccacggtcccagctcac

SEQ ID NO: 2999 - DNA, 20 bp, synthetic construct
  source 1..20: mol_type = other DNA
ggtcccagctcacgttctcc

SEQ ID NO: 3000 - DNA, 20 bp, synthetic construct
  source 1..20: mol_type = other DNA
cggtcccagctcacgttctc

SEQ ID NO: 3001 - DNA, 20 bp, synthetic construct
  source 1..20: mol_type = other DNA
cacggtcccagctcacgttc

SEQ ID NO: 3002 - DNA, 20 bp, synthetic construct
  source 1..20: mol_type = other DNA
ccacggtcccagctcacgtt

SEQ ID NO: 3003 - DNA, 20 bp, synthetic construct
  source 1..20: mol_type = other DNA
acggtcccagctcacgttct

SEQ ID NO: 3004 - DNA, 20 bp, synthetic construct
  source 1..20: mol_type = other DNA
tctgccacggtcccagctca

SEQ ID NO: 3005 - DNA, 20 bp, synthetic construct
  source 1..20: mol_type = other DNA
tgccttcttgcctaatatta

SEQ ID NO: 3006 - DNA, 20 bp, synthetic construct
  source 1..20: mol_type = other DNA
gtctcatattccagttctgc

SEQ ID NO: 3007 - DNA, 20 bp, synthetic construct
  source 1..20: mol_type = other DNA
tccttggacaacagcgtgcc

SEQ ID NO: 3008 - DNA, 20 bp, synthetic construct
  source 1..20: mol_type = other DNA
agctcacgttctccaggttg

SEQ ID NO: 3009 - DNA, 20 bp, synthetic construct
  source 1..20: mol_type = other DNA
cttggacaacagcgtgccgc

SEQ ID NO: 3010 - DNA, 20 bp, synthetic construct
  source 1..20: mol_type = other DNA
ttggacaacagcgtgccgcc

SEQ ID NO: 3011 - DNA, 20 bp, synthetic construct
  source 1..20: mol_type = other DNA
gctcacgttctccaggttgt

SEQ ID NO: 3012 - DNA, 20 bp, synthetic construct
  source 1..20: mol_type = other DNA
tcccagctcacgttctccag

SEQ ID NO: 3013 - DNA, 20 bp, synthetic construct
  source 1..20: mol_type = other DNA
ccttggacaacagcgtgccg

SEQ ID NO: 3014 - DNA, 20 bp, synthetic construct
  source 1..20: mol_type = other DNA
acagcgtgccgcctgatggc

SEQ ID NO: 3015 - DNA, 20 bp, synthetic construct
  source 1..20: mol_type = other DNA
cagctcacgttctccaggtt

SEQ ID NO: 3016 - DNA, 20 bp, synthetic construct
  source 1..20: mol_type = other DNA
gcgtgccgcctgatggcttt

SEQ ID NO: 3017 - DNA, 20 bp, synthetic construct
  source 1..20: mol_type = other DNA
gtcccagctcacgttctcca

SEQ ID NO: 3018 - DNA, 20 bp, synthetic construct
  source 1..20: mol_type = other DNA
ctccttggacaacagcgtgc

SEQ ID NO: 3019 - DNA, 20 bp, synthetic construct
  source 1..20: mol_type = other DNA
agcgtgccgcctgatggctt

SEQ ID NO: 3020 - DNA, 20 bp, synthetic construct
  source 1..20: mol_type = other DNA
cacgttctccaggttgttgt

SEQ ID NO: 3021 - DNA, 19 bp, synthetic construct
  source 1..19: mol_type = other DNA
tgttgcaatattttccgtg

SEQ ID NO: 3022 - DNA, 19 bp, synthetic construct
  source 1..19: mol_type = other DNA
ctgttgcaatattttccgt

SEQ ID NO: 3023 - DNA, 20 bp, synthetic construct
  source 1..20: mol_type = other DNA
gccacggtcccagctcacgt

SEQ ID NO: 3024 - DNA, 20 bp, synthetic construct
  source 1..20: mol_type = other DNA
cggctcaactatctgctcag

SEQ ID NO: 3025 - DNA, 19 bp, synthetic construct
  source 1..19: mol_type = other DNA
gtgtcccaaagctgtttgc

SEQ ID NO: 3026 - DNA, 23 bp, synthetic construct
  source 1..23: mol_type = other DNA
caacgtggaaaccctcaaaggcc

SEQ ID NO: 3027 - DNA, 21 bp, synthetic construct
  source 1..21: mol_type = other DNA
actttgtccatgtcctcacta

SEQ ID NO: 3028 - DNA, 18 bp, synthetic construct
  source 1..18: mol_type = other DNA
cctgtcaccttcgccttc

SEQ ID NO: 3029 - DNA, 22 bp, synthetic construct
  source 1..22: mol_type = other DNA
acccaccttgttagccacctcc

SEQ ID NO: 3030 - DNA, 15 bp, synthetic construct
  source 1..15: mol_type = other DNA
tcgccgcttgctgca

SEQ ID NO: 3031 - DNA, 17 bp, synthetic construct
  source 1..17: mol_type = other DNA
atcggccgtgatgtcga

SEQ ID NO: 3032 - DNA, 23 bp, synthetic construct
  source 1..23: mol_type = other DNA
ccatggtcaaccccaccgtgttc

SEQ ID NO: 3033 - DNA, 20 bp, synthetic construct
  source 1..20: mol_type = other DNA
  modified_base 1: mod_base = OTHER; note = 2'-MOE  5-methylcytidine 3'-phosphorothioate
  modified_base 2: mod_base = OTHER; note = 2'-MOE 5-methylcytidine 3'-phosphodiester
  modified_base 3: mod_base = OTHER; note = 2'-MOE guanosine 3'-phosphodiester
  modified_base 4: mod_base = OTHER; note = 2'-MOE thymidine 3'-phosphodiester
  modified_base 5: mod_base = OTHER; note = 2'-MOE 5-methylcytidine 3'-phosphorothioate
  modified_base 6: mod_base = OTHER; note = 2'-deoxythymidine 3'-phosphorothioate
  modified_base 7: mod_base = OTHER; note = 2'-deoxyadenosine 3'-phosphorothioate
  modified_base 8: mod_base = OTHER; note = 5-methyl-2'-deoxycytidine 3'-phosphorothioate
  modified_base 9: mod_base = OTHER; note = 2'-deoxyadenosine 3'-phosphorothioate
  modified_base 10..11: mod_base = OTHER; note = 2'-deoxyguanosine 3'-phosphorothioate
  modified_base 12: mod_base = OTHER; note = 2'-deoxyadenosine 3'-phosphorothioate
  modified_base 13..15: mod_base = OTHER; note = 2'-deoxythymidine 3'-phosphorothioate
  modified_base 16: mod_base = OTHER; note = 2'-MOE thymidine 3'-phosphodiester
  modified_base 17: mod_base = OTHER; note = 2'-MOE 5-methylcytidine 3'-phosphodiester
  modified_base 18: mod_base = OTHER; note = 2'-MOE thymidine 3'-phosphorothioate
  modified_base 19: mod_base = OTHER; note = 2'-MOE adenosine 3'-phosphorothioate
  modified_base 20: mod_base = OTHER; note = 2'-MOE guanosine
ccgtctacaggattttctag

SEQ ID NO: 3034 - DNA, 20 bp, synthetic construct
  source 1..20: mol_type = other DNA
  modified_base 1: mod_base = OTHER; note = 2'-MOE  thymidine 3'-phosphorothioate
  modified_base 2: mod_base = OTHER; note = 2'-MOE thymidine 3'-phosphodiester
  modified_base 3..4: mod_base = OTHER; note = 2'-MOE 5-methylcytidine 3'-phosphodiester
  modified_base 5: mod_base = OTHER; note = 2'-MOE guanosine 3'-phosphorothioate
  modified_base 6: mod_base = OTHER; note = 2'-deoxythymidine 3'-phosphorothioate
  modified_base 7: mod_base = OTHER; note = 5-methyl-2'-deoxycytidine 3'-phosphorothioate
  modified_base 8: mod_base = OTHER; note = 2'-deoxythymidine 3'-phosphorothioate
  modified_base 9: mod_base = OTHER; note = 2'-deoxyadenosine 3'-phosphorothioate
  modified_base 10: mod_base = OTHER; note = 5-methyl-2'-deoxycytidine 3'-phosphorothioate
  modified_base 11: mod_base = OTHER; note = 2'-deoxyadenosine 3'-phosphorothioate
  modified_base 12..13: mod_base = OTHER; note = 2'-deoxyguanosine 3'-phosphorothioate
  modified_base 14: mod_base = OTHER; note = 2'-deoxyadenosine 3'-phosphorothioate
  modified_base 15: mod_base = OTHER; note = 2'-deoxythymidine 3'-phosphorothioate
  modified_base 16..17: mod_base = OTHER; note = 2'-MOE thymidine 3'-phosphodiester
  modified_base 18: mod_base = OTHER; note = 2'-MOE thymidine 3'-phosphorothioate
  modified_base 19: mod_base = OTHER; note = 2'-MOE 5-methylcytidine 3'-phosphorothioate
  modified_base 20: mod_base = OTHER; note = 2'-MOE thymidine
ttccgtctacaggattttct

SEQ ID NO: 3035 - DNA, 20 bp, synthetic construct
  source 1..20: mol_type = other DNA
  modified_base 1: mod_base = OTHER; note = 2'-MOE  thymidine 3'-phosphorothioate
  modified_base 2: mod_base = OTHER; note = 2'-MOE thymidine 3'-phosphodiester
  modified_base 3..4: mod_base = OTHER; note = 2'-MOE 5-methylcytidine 3'-phosphodiester
  modified_base 5: mod_base = OTHER; note = 2'-MOE guanosine 3'-phosphodiester
  modified_base 6: mod_base = OTHER; note = 2'-MOE thymidine 3'-phosphodiester
  modified_base 7: mod_base = OTHER; note = 5-methyl-2'-deoxycytidine 3'-phosphorothioate
  modified_base 8: mod_base = OTHER; note = 2'-deoxythymidine 3'-phosphorothioate
  modified_base 9: mod_base = OTHER; note = 2'-deoxyadenosine 3'-phosphorothioate
  modified_base 10: mod_base = OTHER; note = 5-methyl-2'-deoxycytidine 3'-phosphorothioate
  modified_base 11: mod_base = OTHER; note = 2'-deoxyadenosine 3'-phosphorothioate
  modified_base 12..13: mod_base = OTHER; note = 2'-deoxyguanosine 3'-phosphorothioate
  modified_base 14: mod_base = OTHER; note = 2'-deoxyadenosine 3'-phosphorothioate
  modified_base 15..16: mod_base = OTHER; note = 2'-deoxythymidine 3'-phosphorothioate
  modified_base 17: mod_base = OTHER; note = 2'-MOE thymidine 3'-phosphodiester
  modified_base 18: mod_base = OTHER; note = 2'-MOE thymidine 3'-phosphorothioate
  modified_base 19: mod_base = OTHER; note = 2'-MOE 5-methylcytidine 3'-phosphorothioate
  modified_base 20: mod_base = OTHER; note = 2'-MOE thymidine
ttccgtctacaggattttct

SEQ ID NO: 3036 - DNA, 20 bp, synthetic construct
  source 1..20: mol_type = other DNA
  modified_base 1: mod_base = OTHER; note = 2'-MOE  guanosine 3'-phosphorothioate
  modified_base 2: mod_base = OTHER; note = 2'-MOE 5-methylcytidine 3'-phosphodiester
  modified_base 3: mod_base = OTHER; note = 2'-MOE adenosine 3'-phosphodiester
  modified_base 4: mod_base = OTHER; note = 2'-MOE 5-methylcytidine 3'-phosphodiester
  modified_base 5: mod_base = OTHER; note = 2'-MOE adenosine 3'-phosphorothioate
  modified_base 6: mod_base = OTHER; note = 5-methyl-2'-deoxycytidine 3'-phosphorothioate
  modified_base 7..8: mod_base = OTHER; note = 2'-deoxyadenosine 3'-phosphorothioate
  modified_base 9: mod_base = OTHER; note = 2'-deoxyguanosine 3'-phosphorothioate
  modified_base 10: mod_base = OTHER; note = 2'-deoxythymidine 3'-phosphorothioate
  modified_base 11..13: mod_base = OTHER; note = 2'-deoxyadenosine 3'-phosphorothioate
  modified_base 14: mod_base = OTHER; note = 2'-deoxyguanosine 3'-phosphorothioate
  modified_base 15: mod_base = OTHER; note = 5-methyl-2'-deoxycytidine 3'-phosphorothioate
  modified_base 16: mod_base = OTHER; note = 2'-MOE thymidine 3'-phosphodiester
  modified_base 17: mod_base = OTHER; note = 2'-MOE adenosine 3'-phosphodiester
  modified_base 18: mod_base = OTHER; note = 2'-MOE guanosine 3'-phosphorothioate
  modified_base 19: mod_base = OTHER; note = 2'-MOE 5-methylcytidine 3'-phosphorothioate
  modified_base 20: mod_base = OTHER; note = 2'-MOE adenosine
gcacacaagtaaagctagca

1. (canceled)

2. (canceled)

3. An oligomeric compound comprising a modified oligonucleotide consisting of 12 to 30 linked nucleosides and having a nucleobase sequence comprising at least 8, at least 9, at least 10, at least 11, at least 12, at least 13, at least 14, at least 15, at least 16, at least 17, at least 18, at least 19, or 20 contiguous nucleobases complementary to:
an equal length portion of nucleobases 16915-16947 of SEQ ID NO: 2;
wherein the modified oligonucleotide comprises at least one modification selected from a modified sugar moiety and a modified internucleoside linkage.

4. An oligomeric compound comprising a modified oligonucleotide consisting of 12 to 30 linked nucleosides and having a nucleobase sequence comprising at least 8, at least 9, at least 10, at least 11, at least 12, at least 13, at least 14, at least 15, at least 16, at least 17, at least 18, at least 19 or 20 contiguous nucleobases of a sequence selected from:
SEQ ID NOs: 2376, 2453, 2530, 2607, 2683, 2759, 2836, 2913, 539, and 616;
wherein the modified oligonucleotide comprises at least one modification selected from a modified sugar moiety and a modified internucleoside linkage.

5. The oligomeric compound of claim 3, wherein the modified oligonucleotide has a nucleobase sequence that is at least 85%, at least 90%, at least 95%, or 100% complementary to the nucleobase sequence of any one of SEQ ID NOs: 1-10 and 14 when measured across the entire nucleobase sequence of the modified oligonucleotide.

6. (canceled)

7. (canceled)

8. The oligomeric compound of claim 3, wherein the modified oligonucleotide comprises at least one modified nucleoside comprising a bicyclic sugar moiety.

9. The oligomeric compound of claim 8, wherein the bicyclic sugar moiety has a 2′-4′ bridge selected from —O—CH₂—; and —O—CH(CH₃)—.

10. The oligomeric compound of claim 3, wherein the modified oligonucleotide comprises at least one modified nucleoside comprising a non-bicyclic modified sugar moiety.

11. The oligomeric compound of claim 10, wherein the non-bicyclic modified sugar moiety is a 2′-O(CH₂)₂OCH₃ ribosyl sugar moiety or a 2′-OMe modified sugar moiety.

12. The oligomeric compound of claim 3, wherein the modified oligonucleotide comprises at least one modified nucleoside comprising a sugar surrogate.

13. (canceled)

14. The oligomeric compound of claim 3, wherein the modified oligonucleotide is a gapmer.

15. The oligomeric compound of claim 3, wherein the modified oligonucleotide comprises at least one modified internucleoside linkage.

16. (canceled)

17. The oligomeric compound of claim 15, wherein at least one internucleoside linkage is a phosphorothioate internucleoside linkage.

18. The oligomeric compound of claim 15, wherein the modified oligonucleotide comprises at least one phosphodiester internucleoside linkage.

19. (canceled)

20. (canceled)

21. (canceled)

22. The oligomeric compound of claim 3, wherein the modified oligonucleotide comprises at least one modified nucleobase.

23. The oligomeric compound of claim 22, wherein the modified nucleobase is a 5-methylcytosine.

24.-30. (canceled)

31. The oligomeric compound of claim 3, wherein the modified oligonucleotide consists of 12-30, 12-22, 12-20,14-18, 14-20, 15-17, 15-25, 16-20, 18-22, or 18-20 linked nucleosides.

32. (canceled)

33. (canceled)

34. The oligomeric compound of claim 3, wherein the modified oligonucleotide consists of 16, 17, 18, 19, or 20 linked nucleosides.

35. The oligomeric compound of claim 3, wherein the modified oligonucleotide consists of 20 linked nucleosides.

36.-41. (canceled)

42. The oligomeric compound of claim 3, consisting of the modified oligonucleotide.

43. The oligomeric compound of claim 3, wherein the oligomeric compound comprises a conjugate group.

44.-59. (canceled)

60. An oligomeric duplex, comprising a first oligomeric compound and a second oligomeric compound comprising a second modified oligonucleotide, wherein the first oligomeric compound is an oligomeric compound of claim 3.

61.-101. (canceled)

102. A population of oligomeric compounds of claim 3, wherein all of the phosphorothioate internucleoside linkages of the modified oligonucleotide are stereorandom.

103. A pharmaceutical composition comprising an oligomeric compound of claim 3 and a pharmaceutically acceptable diluent.

104. The pharmaceutical composition of claim 103, wherein the pharmaceutically acceptable diluent is artificial cerebrospinal fluid (aCSF) or phosphate-buffered saline (PBS).

105. The pharmaceutical composition of claim 104, wherein the pharmaceutical composition consists essentially of the oligomeric compound and aCSF.

106. The pharmaceutical composition of claim 104, wherein the pharmaceutical composition consists essentially of the oligomeric compound and PBS.

107.-125. (canceled)
